(19) United States
(12) Patent Application Publication
(10) Pub. No.: US 2024/0218069 A1
(43) Pub. Date: Jul. 4, 2024

(54) BI-SPECIFIC ANTIBODIES COMPRISING ANTI-B7H3 BINDING MOLECULES

(71) Applicant: LYVGEN BIOPHARMA HOLDINGS LIMITED, Grand Cayman (KY)

(72) Inventors: Jieyi WANG, Belmont, CA (US); Yi WU, Shanghai (CN); Xiang XU, Shanghai (CN)

(73) Assignee: LYVGEN BIOPHARMA HOLDINGS LIMITED, Grand Cayman (KY)

(21) Appl. No.: 18/556,596

(22) PCT Filed: Apr. 28, 2022
(86) PCT No.: PCT/US2022/026731

§ 371 Date: Oct. 20, 2023

(30) Foreign Application Priority Data
Apr. 28, 2021 (WO) PCT/CN2021/090537

(51) Int. Cl. C07K 16/28; A61K 39/00; A61P 35/00

(52) U.S. Cl. CPC C07K 16/2827; A61P 35/00; C07K 16/2803; C07K 16/2809; C07K 16/2818; C07K 16/2878; A61K 39/00; C07K 2317/24; C07K 2317/31

(57) ABSTRACT

A multi-specific antibody (e.g., bi-specific or tri-specific) comprising one antigen binding moiety specific to human B7H3 and one or more antigen binding moieties specific to one or more antigens of interest, for example, CD40, CD137, Glucocorticoid-Induced TNFR-Related protein (GITR), OX40, CD3, CD28, and CD47. Also provided herein are methods for preparing such antibodies and methods of using such for modulating immune responses.

### CROSS REFERENCE TO RELATED APPLICATIONS

[0001] This application claims the benefit of the filing date of International Patent Application No. PCT/CN2021/090537, filed Apr. 28, 2021, the entire contents of which are incorporated by reference herein.

### SEQUENCE LISTING

[0002] The instant application contains a Sequence Listing which has been filed electronically in ASCII format and is hereby incorporated by reference in its entirety. Said ASCII copy, created on Apr. 27, 2022, is named 112238-0098-70010W02_SEQ.txt and is 2,650,405 bytes in size.

### BACKGROUND OF THE INVENTION

[0003] B7H3 (also known as CD276, an immune checkpoint molecule) is aberrantly overexpressed in many types of cancer, and such upregulation is generally associated with a poor clinical prognosis. Recent discoveries indicate a crucial role for B7H3 in promoting carcinogenesis and metastasis.

[0004] Considering the significant roles of B7H3 in cancer immunity and progression, the value of B7H3 in cancer diagnosis and treatment warrants further detailed study. Here, we develop new B7H3-targeting immune therapies that are effective and safe use in the treatment of cancer.

### SUMMARY OF THE INVENTION

[0005] The present disclosure is based, at least in part, on the development of bi-specific and multi-specific antibodies targeting both human B7H3 and other desired antigen, such as CD40, CD137, GITR, OX40, CD47, CD3 or CD28. Such bi-specific and multi-specific antibodies exhibit substantially similar antigen-binding affinity and specificity as the parent antibodies and show one or more superior features, for example, simultaneous binding to both target antigens, enhanced antagonistic activity of B7H3 and optionally of the other desired antigen, superior anti-tumor activities, or a combination thereof. For example, the B7H3/CD40 bsAb bispecific antibodies including Ly1581, Ly1579, Ly1663 and Ly1585 showed much stronger efficacy and better safety compared to the CD40 parental mAb Ly253-G2 (corresponding to CD40 Ab1 in Table 1).

[0006] Accordingly, the present disclosure features, in one aspect, a multi-specific antibody, comprising:
[0007] (a) a first antigen binding moiety binding to a first antigen, wherein the first antigen binding moiety comprising a first heavy chain variable region (V_{H}) and a first light chain variable region (V_{L});
[0008] (b) a second antigen binding moiety binding to a second antigen, wherein the second antigen binding moiety comprising a second V_{H} and a second V_{L}; and optionally
[0009] (c) a third antigen binding moiety binding to a third antigen, wherein the third antigen binding moiety comprising a third V_{H} and a third V_{L}.

[0010] One of the first antigen and the second antigen is human B7H3 and the other one is human CD40, human CD137, human Glucocorticoid-Induced TNFR-Related protein (GITR), human OX40, human CD3, human CD28, or human CD47. The optional third antigen is selected from the group consisting of human CD40, human CD137, human Glucocorticoid-Induced TNFR-Related protein (GITR), human OX40, human CD3, human CD28, and human CD47. The optional third antigen being different from the first antigen and the second antigen.

[0011] In some embodiments, the antigen binding moiety that binds B7H3 comprises (i) a heavy chain variable region (V_{H}) that comprises the same heavy chain complementary determining regions (CDRs) as antibody B7H3 Ab1 or B7H3 Ab2, and (ii) a light chain variable region (V_{L}) that comprises the same light chain CDRs as antibody B7H3 Ab1 or B7H3 Ab2.

[0012] In some embodiments, the antigen binding moiety that binds B7H3 comprises (i) a heavy chain variable region (V_{H}) that comprises heavy chain complementary determining regions (CDRs), which collectively contain up to 5 amino acid residue variations relative to the heavy chain CDR3 of antibody B7H3 Ab1 or B7H3 Ab2, and (ii) a light chain variable region (V_{L}) that comprises light chain CDRs, which collectively contain up to 5 amino acid residue variations relative to the light chain CDRs of antibody B7H3 Ab1 or B7H3 Ab2.

[0013] In some examples, the antigen binding moiety that binds B7H3 comprises (i) the V_{H} that comprises an amino acid sequence at least 80% identical to that of antibody B7H3 Ab1 or B7H3 Ab2; and (ii) the V_{L} that comprises an amino acid sequence at least 80% identical to that of antibody B7H3 Ab1 or B7H3 Ab2. In specific examples, the antigen binding moiety that binds B7H3 comprises the same V_{H} and same V_{L} as antibody B7H3 Ab1 or B7H3 Ab2.

[0014] Alternatively or in addition, the antigen binding moieties that bind human CD40, human CD137, human Glucocorticoid-Induced TNFR-Related protein (GITR), human OX40, human CD3, human CD28, or human CD47 each comprise (i) a heavy chain variable region (V_{H}) that comprises the same heavy chain complementary determining regions (CDRs) as antibody CD40 Ab1, CD137 Ab1, GITR Ab1, OX40 Ab1, CD28 Ab1, CD28 Ab2, CD28 Ab3, CD47 Ab1, CD47 Ab2, CD3 Ab1, or CD3 Ab2; and (ii) a light chain variable region (V_{L}) that comprises the same light chain CDRs as antibody CD40 Ab1, CD137 Ab1, GITR Ab1, OX40 Ab1, CD28 Ab1, CD28 Ab2, CD28 Ab3, CD47 Ab1, CD47 Ab2, CD3 Ab1, or CD3 Ab2.

[0015] In some embodiments, the antigen binding moieties that bind human CD40, human CD137, human Glucocorticoid-Induced TNFR-Related protein (GITR), human OX40, human CD3, human CD28, or human CD47 each comprise (i) a heavy chain variable region (V_{H}) that comprises heavy chain complementary determining regions (CDRs), which collectively contain up to 5 amino acid residue variations relative to the heavy chain CDR3 of antibody CD40 Ab1, CD137 Ab1, GITR Ab1, OX40 Ab1, CD28 Ab1, CD28 Ab2, CD28 Ab3, CD47 Ab1, CD47 Ab2, CD3 Ab1, or CD3 Ab2; and (ii) a light chain variable region (V_{L}) that comprises light chain CDRs, which collectively contain up to 5 amino acid residue variations relative to the light chain CDRs of CD40 Ab1, CD137 Ab1, GITR Ab1, OX40 Ab1, CD28 Ab1, CD28 Ab2, CD28 Ab3, CD47 Ab1, CD47 Ab2, CD3 Ab1, or CD3 Ab2.

[0016] In some examples, the antigen binding moieties that bind human CD40, human CD137, human Glucocorticoid-Induced TNFR-Related protein (GITR), human OX40, human CD3, human CD28, or human CD47 each comprise (i) the V_{H} that comprises an amino acid sequence at least 80% identical to that of antibody CD40 Ab1, CD137 Ab1, GITR Ab1, OX40 Ab1, CD28 Ab1, CD28 Ab2, CD28 Ab3, CD47 Ab1, CD47 Ab2, CD3 Ab1, or CD3 Ab2; and (ii) the V_{L} that comprises an amino acid sequence at least 80% identical to that of antibody CD40 Ab1, CD137 Ab1, GITR Ab1, OX40 Ab1, CD28 Ab1, CD28 Ab2, CD28 Ab3, CD47 Ab1, CD47 Ab2, CD3 Ab1, or CD3 Ab2. In specific examples, the antigen binding moieties that bind human CD40, human CD137, human Glucocorticoid-Induced TNFR-Related protein (GITR), human OX40, human CD3, human CD28, or human CD47 each comprise the same V_{H} and same V_{L} as antibody CD40 Ab1, CD137 Ab1, GITR Ab1, OX40 Ab1, CD28 Ab1, CD28 Ab2, CD28 Ab3, CD47 Ab1, CD47 Ab2, CD3 Ab1, or CD3 Ab2.

[0017] In some embodiments, the multi-specific antibody disclosed herein can be a bi-specific antibody that comprises the first antigen binding moiety and the second antigen binding moiety. In some instances, the bi-specific antibody is of a two-chain format. In some instances, the bi-specific antibody is of a three-chain format. Alternatively, the bi-specific antibody is of a four-chain format.

[0018] In some examples, the bi-specific antibody disclosed herein may comprise (ii) a first antigen binding moiety that comprises a heavy chain that comprises the first V_{H} and a heavy chain constant region or a fragment thereof and a light chain that comprises the first V_{L} and a light chain constant region; and (ii) a second antigen binding moiety, which is a single chain variable fragment (scFv); and wherein the scFv is linked to either the heavy chain or the light chain of (i). The scFv may be linked to the N-terminus of the heavy chain of (i) or the C-terminus of the heavy chain. Such a bi-specific antibody may comprise a first polypeptide that comprises the heavy chain of (i) fused to the scFv, and a second polypeptide that comprises the light chain of (i). Alternatively, the bi-specific antibody may comprise a first polypeptide that comprise the heavy chain of (i); and a second polypeptide that comprises the light chain of (i) fused to the scFv.

[0019] In some instances, the first antigen binding moiety binds B7H3 and the second antigen binding moiety may bind one of CD40, CD137, GITR, OX40, CD3, CD28, and CD47. In some instances, the multi-specific antibody is a multi-chain complex comprising two copies of each of the first polypeptide and the second polypeptide.

[0020] In some instances, the bi-specific antibody is of a three-chain format, which may comprise (i) a first polypeptide that comprise a first heavy chain of the first antigen binding moiety, wherein the first heavy chain comprises the first V_{H} and a first heavy chain constant region or a fragment comprising the CH3 domain therein; (ii) a second polypeptide that comprises a second heavy chain of the first antigen binding moiety and the second antigen binding moiety, which is a single chain variable fragment (scFv) comprising the second V_{H} and second V_{L}, wherein the second heavy chain comprises the first V_{H} and a second heavy chain constant region or a fragment comprising the CH3 domain therein; and (iii) a third polypeptide that comprises a light chain of the first antigen binding moiety, which comprises the first V_{L} and a light chain constant region. In some examples, the first and second heavy chain constant regions comprise mutations in the CH3 domains that enhances heterodimeration over homodimeration as relative to the wild-type counterpart and/or reduces protein A binding. In some examples, the scFv is located between the first V_{H} and the second Fc fragment or the CH3 domain thereof in the second polypeptide. Alternatively, the scFv is located at the C-terminus of the second polypeptide.

[0021] In some instances, the bi-specific antibody disclosed herein may comprise: (i) a first polypeptide that comprise a first heavy chain of the first antigen binding moiety and one of the second V_{H} and the second V_{L} of the second antigen binding moiety; wherein the first heavy chain comprises the first V_{H} and a first heavy chain constant region or a fragment comprising the CH3 domain therein; (ii) a second polypeptide that comprises a second heavy chain of the first antigen binding moiety and the other one of the second V_{H} and second V_{L} of the second antigen binding moiety, wherein the second heavy chain comprises the first V_{H} and a second heavy chain constant region or a fragment comprising the CH3 domain therein; and (iii) a third polypeptide that comprises a light chain of the first antigen binding moiety, which comprises the first V_{L} and a light chain constant region. In some examples, the first and second heavy chain constant regions comprise mutations in the CH3 domains that enhances heterodimeration over homodimeration as relative to the wild-type counterpart. In some examples, the first and second heavy chain constant regions comprise the mutations, which are knob-in-hole mutations, charged mutations, or ZW1 mutations. Alternatively or in addition, one of the first and second heavy chain constant regions comprises a mutation that reduces protein A binding activity relative to the wild-type counterpart.

[0022] In some instances, the bi-specific antibody is of a four-chain format, which may comprise: (i) a first polypeptide comprising a first heavy chain of the first antigen binding moiety, the first heavy chain comprising the first V_{H} and a first heavy chain constant region or a fragment comprising the CH3 domain therein; (ii) a second polypeptide comprising a second heavy chain of the second antigen binding moiety, the second heavy chain comprising the second V_{H}, a light chain constant region, and a second heavy chain constant fragment comprising a CH3 domain; (iii) a third polypeptide comprising a light chain of the first antigen moiety, which comprises the first V_{L} and a light chain constant region; and (iv) a fourth polypeptide comprising a light chain of the second antigen moiety, the light chain comprising the second V_{L} linked to a CH1 domain of a heavy chain constant region. In some examples, the first and second heavy chain constant regions comprise mutations in the CH3 domains that enhances heterodimeration over homodimeration as relative to the wild-type counterpart.

[0023] In some instances, the bi-specific antibody disclosed herein may comprise: (i) a first polypeptide comprising a first heavy chain of the first antigen binding moiety, wherein the first heavy chain comprises the first V_{H} and a first heavy chain constant region or a fragment comprising the CH3 domain therein; (ii) a second polypeptide comprising a second heavy chain, which comprises the first V_{H}, the second antibody binding moiety that is a scFv fragment comprising the second V_{H} and the second V_{L}, and a second heavy chain constant region or a fragment comprising the CH3 domain therein; (iii) a third polypeptide comprising a light chain of the first antigen binding moiety, which comprises the first V_{L} and a light chain constant region; and (iv) a fourth polypeptide comprising the scFv. In some examples, the first and second heavy chain constant regions comprise mutations in the CH3 domains that enhances heterodimeration over homodimeration as relative to the wild-type counterpart.

[0024] In some instances, the bi-specific antibody disclosed herein may comprise: (i) a first polypeptide comprising a first heavy chain of the first antigen binding moiety, wherein the first heavy chain comprises the first V_{H} and a first heavy chain constant region or a fragment comprising the CH3 domain therein; (ii) a second polypeptide comprising a light chain of the first antigen binding moiety, which comprises the first V_{L} and a light chain constant region; (iii) a third polypeptide comprising the second V_{H}, a first TCR fragment, and a second heavy chain constant fragment comprising a CH3 domain; and (iv) a fourth polypeptide comprising the second V_{L} and a second TCR fragment. The first and second TCR fragments collectively are a TCR alpha chain fragment and a TCR beta chain fragment, which form a dimer. In some instances, the first and second heavy chain constant regions comprise mutations in the CH3 domains that enhances heterodimeration over homodimeration as relative to the wild-type counterpart. In some examples, the third polypeptide further comprises the first V_{H} linked to a CH1 domain of a heavy chain constant region.

[0025] In some examples, a bi-specific antibody disclosed herein comprises the first antigen binding moiety that binds B7H3 and the second antigen binding moiety that binds CD40. Examples include Ly1581, Ly1660, Ly1661, Ly1662, Ly1663, Ly1679, Ly1935, and Ly1936.

[0026] In some examples, a bi-specific antibody disclosed herein comprises the first antigen binding moiety that binds B7H3 and the second antigen binding moiety that binds CD137. Examples include Ly1937, Ly1938, Ly1939, Ly1940, Ly1941, Ly1942, Ly1943, and Ly1944.

[0027] In some examples, a bi-specific antibody disclosed herein comprises the first antigen binding moiety that binds B7H3 and the second antigen binding moiety that binds GITR. Examples include Ly1945, Ly1946, Ly1947, Ly1948, Ly1049, Ly1950, Ly1951, and Ly1952.

[0028] In some examples, a bi-specific antibody disclosed herein comprises the first antigen binding moiety that binds B7H3 and the second antigen binding moiety that binds OX40. Examples include Ly1953, Ly1954, Ly1955, Ly1956, Ly1957, Ly1958, Ly1959, and Ly1960.

[0029] In some examples, a bi-specific antibody disclosed herein comprises the first antigen binding moiety that binds B7H3 and the second antigen binding moiety that binds CD47. Examples include Ly2043, Ly2044, Ly2045, Ly2046, Ly2047, Ly2048, Ly2049, Ly2050, Ly2051, Ly2052, Ly2053, Ly2054, Ly2055, Ly2056, Ly2057, Ly2058, Ly2059, Ly2060, Ly2061, Ly2062, Ly2063, and Ly2064.

[0030] In some examples, a bi-specific antibody disclosed herein comprises the first antigen binding moiety that binds B7H3 and the second antigen binding moiety that binds CD3. Examples include Ly1900, Ly1901, Ly1902, Ly1903, and Ly1904.

[0031] In some embodiments, the multi-specific antibody disclosed herein is a tri-specific antibody that comprises (i) the first antigen binding moiety, (ii) the second antigen binding moiety, and (iii) the third antigen binding moiety.

[0032] In some examples, the tri-specific antibody disclosed herein may comprise: (i) a first polypeptide comprising a first heavy chain that comprises the first V_{H} of the first antigen binding moiety and first heavy chain constant region or a fragment comprising the CH3 domain therein; (ii) a second polypeptide comprising the first V_{H}, a second heavy chain comprising the second V_{H} of the second antigen binding moiety and a light chain constant region, and a second heavy chain constant region or a fragment comprising the CH3 domain therein; (iii) a third polypeptide comprising a light chain of the first antigen binding moiety, which comprises the first V_{L} and a light chain constant region; and (iv) a fourth polypeptide comprising the second V_{L} of the second antigen binding moiety and a CH1 fragment of a heavy chain constant region. The first polypeptide, the second polypeptide or both may further comprise the third antigen binding moiety, which is a single chain variable fragment (scFv). In some instances, the first and second heavy chain constant regions comprise mutations in the CH3 domains that enhances heterodimeration over homodimeration as relative to the wild-type counterpart.

[0033] In some examples, the tri-specific antibody disclosed here may comprise: (i) a first polypeptide comprising a first heavy chain that comprises the first V_{H} of the first antigen binding moiety and a first heavy chain constant region or a fragment comprising the CH3 domain therein; (ii) a second polypeptide comprising the first V_{H}, a second heavy chain comprising the second V_{L} of the second antigen binding moiety and a CH1 domain of a heavy chain constant region, and a second heavy chain constant region or a fragment comprising the CH3 domain therein; (iii) a third polypeptide comprising a light chain of the first antigen binding moiety; and (iv) a fourth polypeptide comprising the second V_{H} of the second antigen binding moiety and a light chain constant region. The first polypeptide, the second polypeptide or both may further comprise the third antigen binding moiety, which is a single chain variable fragment (scFv). In some examples, the first and second heavy chain constant regions comprise mutations in the CH3 domains that enhances heterodimeration over homodimeration as relative to the wild-type counterpart.

[0034] In some examples, the tri-specific antibody disclosed herein may comprise: (i) a first polypeptide comprising a first heavy chain that comprises the first V_{H} of the first antigen binding moiety, first heavy chain constant region or a fragment comprising the CH3 domain therein, and one of the third V_{H} and third V_{L} of the third antigen binding moiety; (ii) a second polypeptide comprising the first V_{H}, a second heavy chain comprising the second V_{H} of the second antigen binding moiety and a light chain constant region, a second heavy chain constant region or a fragment comprising the CH3 domain therein, and the other one of the third V_{H} and third V_{L}; (iii) a third polypeptide comprising a light chain of the first antigen binding moiety, which comprises the first V_{L} and a light chain constant region; and (iv) a fourth polypeptide comprising the second V_{L} of the second antigen binding moiety and a CH1 domain of a heavy chain constant region. In some instances, the first and second heavy chain constant regions may comprise mutations in the CH3 domains that enhances heterodimeration over homodimeration as relative to the wild-type counterpart.

[0035] In some examples, the tri-specific antibody disclosed herein may comprise: (i) a first polypeptide comprising a first heavy chain that comprises the first V_{H} of the first antigen binding moiety, a first heavy chain constant region or a fragment comprising the CH3 domain therein, and one of the third V_{H} and third V_{L} of the third antigen binding moiety; (ii) a second polypeptide comprising the first V_{H}, a second heavy chain comprising the second V_{L} of the second antigen binding moiety and a CH1 domain of a heavy chain constant region, a second heavy chain constant region or a fragment comprising the CH3 domain therein, and the other one of the third V_{H} and third V_{L}; (iii) a third polypeptide comprising a light chain of the first antigen binding moiety, which comprises the first V_{L} and a light chain constant region; and (iv) a fourth polypeptide comprising the second V_{H} of the second antigen binding moiety and a light chain constant region. In some instances, the first and second heavy chain constant regions may comprise mutations in the CH3 domains that enhances heterodimeration over homodimeration as relative to the wild-type counterpart.

[0036] In some examples, the tri-specific antibody disclosed herein may comprise: (i) a first polypeptide comprising a first heavy chain that comprises the first V_{H} of the first antigen binding moiety and a first heavy chain constant region or a fragment comprising the CH3 domain therein; (ii) a second polypeptide comprising the first V_{H}, the second antigen binding moiety, which is a scFv, and a second heavy chain constant region or a fragment comprising the CH3 domain therein; and (iii) a third polypeptide comprising a light chain of the first antigen binding moiety, which comprises the first V_{L} and a light chain constant region. The first polypeptide, the second polypeptide, or both may further comprise the third antigen binding moiety, which is a scFv. In some instances, the first and second heavy chain constant regions may comprise mutations in the CH3 domains that enhances heterodimeration over homodimeration as relative to the wild-type counterpart.

[0037] In some examples, the tri-specific antibody disclosed herein may comprise: (i) a first polypeptide comprising a first heavy chain that comprises the first V_{H} of the first antigen binding moiety, one of the second V_{H} and second V_{L} of the second antigen binding moiety, and a first heavy chain constant region or a fragment comprising the CH3 domain therein; (ii) a second polypeptide comprising the first V_{H}, the other one of the second V_{H} and second V_{L}, and a second heavy chain constant region or a fragment comprising the CH3 domain therein; and (iii) a third polypeptide comprising a light chain of the first antigen binding moiety, which comprises the first V_{L} and a light chain constant region. The first polypeptide, the second polypeptide, or both may further comprise the third antigen binding moiety, which is a scFv, or wherein the third polypeptide further comprises the third antigen binding moiety. In some instances, the first and second heavy chain constant regions may comprise mutations in the CH3 domains that enhances heterodimeration over homodimeration as relative to the wild-type counterpart.

[0038] In some examples, the tri-specific antibodies disclosed herein may comprise: (i) a first polypeptide comprising a first heavy chain that comprises the first V_{H} of the first antigen binding moiety, one of the second V_{H} and second V_{L} of the second antigen binding moiety, a first heavy chain constant region or a fragment comprising the CH3 domain therein, and one of the third V_{H} and third V_{L} of the third antigen binding moiety; (ii) a second polypeptide comprising the first V_{H}, the other one of the second V_{H} and second V_{L}, and a second heavy chain constant region or a fragment comprising the CH3 domain therein, and the other one of the third V_{H} and third V_{L}; and (iii) a third polypeptide comprising a light chain of the first antigen binding moiety, which comprises the first V_{L} and a light chain constant region. The first and second heavy chain constant regions may comprise mutations in the CH3 domains that enhances heterodimeration over homodimeration as relative to the wild-type counterpart.

[0039] In some examples, the tri-specific antibody disclosed herein may comprise: (i) a first polypeptide comprising a first heavy chain that comprises the first V_{H} of the first antigen binding moiety, a first heavy chain constant region or a fragment comprising the CH3 domain therein, and the second antigen binding moiety, which is a scFv; (ii) a second polypeptide comprising the first V_{H}, a second heavy chain constant region or a fragment comprising the CH3 domain therein, and the third antigen binding moiety, which is a scFv; and (iii) a third polypeptide comprising a light chain of the first antigen binding moiety, which comprises the first V_{L} and a light chain constant region. In some instances, the first and second heavy chain constant regions comprise mutations in the CH3 domains that enhances heterodimeration over homodimeration as relative to the wild-type counterpart.

[0040] In some examples, the tri-specific antibody disclosed herein may comprise: (i) a first polypeptide comprising a first heavy chain that comprises the first V_{H} of the first antigen binding moiety and a first heavy chain constant region or a fragment comprising the CH3 domain therein; (ii) a second polypeptide comprising a second heavy chain that comprises the second V_{H} of the second antigen binding moiety and one of the third V_{H} and third V_{L} of the third antigen binding moiety, wherein the third V_{H} is fused with a light chain constant region or the third V_{L} is fused with a CH1 domain of a heavy chain constant region; (iii) a third polypeptide comprising a light chain of the second antigen binding moiety, which comprises the second V_{L} and a light chain constant region, and the other one of the third V_{H} and third V_{L} of the third antigen binding moiety, wherein the third V_{H} is fused with a light chain constant region or the third V_{L} is fused with a CH1 domain of a heavy chain constant region; and (iv) a fourth polypeptide comprising a light chain of the first antigen binding moiety, which comprises the first V_{L} and a light chain constant region. Either the second polypeptide or the third polypeptide may further comprise a second heavy chain constant region or a fragment comprising the CH3 domain therein. In some instances, the first and second heavy chain constant regions comprise mutations in the CH3 domains that enhances heterodimeration over homodimeration as relative to the wild-type counterpart.

[0041] In some examples, the tri-specific antibody disclosed herein may comprise: (i) a first polypeptide comprising the first V_{H} of the first antigen binding moiety, the second V_{H} of the second antigen binding moiety, and a first heavy chain constant region or a fragment comprising the CH3 domain therein; (ii) a second polypeptide comprising the third V_{H} of the third antigen binding moiety and a light chain constant domain; (iii) a third polypeptide comprising the third V_{L} of the third antigen binding moiety and a CH1 domain of a heavy chain constant region; and (iv) a fourth polypeptide comprising a light chain of the first antigen binding moiety, which comprises the first V_{L} and a light chain constant region. Either the second polypeptide or the third polypeptide may further comprise the second V_{L} of the second antigen binding moiety and a second heavy chain constant region or a fragment comprising the CH3 domain therein. In some instances, the first and second heavy chain constant regions comprise mutations in the CH3 domains that enhances heterodimeration over homodimeration as relative to the wild-type counterpart. In some instances, either the second polypeptide or the third polypeptide may further comprises the first V_{H} fused to a CH1 of a heavy chain constant region.

[0042] In some examples, the tri-specific antibody disclosed herein may comprise: (i) a first polypeptide comprising the first V_{H} of the first antigen binding moiety, the second V_{L} of the second antigen binding moiety, and a first heavy chain constant region or a fragment comprising the CH3 domain therein; (ii) a second polypeptide comprising the third V_{H} of the third antigen binding moiety and a light chain constant domain; (iii) a third polypeptide comprising the third V_{L} of the third antigen binding moiety and a CH1 domain of a heavy chain constant region; and (iv) a fourth polypeptide comprising a light chain of the first antigen binding moiety, which comprises the first V_{L} and a light chain constant region. Either the second polypeptide or the third polypeptide may further comprise the second V_{H} of the second antigen binding moiety and a second heavy chain constant region or a fragment comprising the CH3 domain therein. In some instances, the first and second heavy chain constant regions may comprise mutations in the CH3 domains that enhances heterodimeration over homodimeration as relative to the wild-type counterpart. In some instances, either the second polypeptide or the third polypeptide may further comprises the first V_{H} fused to a CH1 of a heavy chain constant region.

[0043] In some examples, tri-specific antibody disclosed herein may comprise: (i) a first polypeptide comprising a heavy chain of the 1^{st} antigen binding moiety and the second antigen binding moiety, wherein the heavy chain of the 1^{st} antigen binding moiety comprises the first V_{H} and a heavy chain constant region, and wherein the second antigen binding moiety is an scFv fragment; and (ii) a second polypeptide comprising a light chain of the 1S antigen binding moiety and the third antigen binding moiety, wherein the light chain comprises the first V_{L} and a light chain constant region, and wherein the third antigen binding moiety is an scFv fragment.

[0044] In some examples, the tri-specific antibody disclosed herein may comprise: (i) a first polypeptide comprising a heavy chain of the 1^{st} antigen binding moiety and the second antigen binding moiety, wherein the heavy chain of the 1^{st} antigen binding moiety comprises the first V_{H} and a first heavy chain constant region, and wherein the second antigen binding moiety is an scFv fragment; (ii) a second polypeptide comprising a heavy chain of the 1^{st} antigen binding moiety and the third antigen binding moiety, wherein the heavy chain comprises the first V_{H} and a second heavy chain constant region, and wherein the third antigen binding moiety is an scFv fragment; and (iii) a third polypeptide comprising a light chain of the first antigen binding moiety, the light chain comprising the first V_{L} and a light chain constant region. In some instances, the first and second heavy chain constant regions comprise mutations in the CH3 domains that enhances heterodimeration over homodimeration as relative to the wild-type counterpart.

[0045] In any of the multi-specific antibodies disclosed herein, the first and second heavy chain constant regions comprise the mutations, which are knob-in-hole mutations, charged mutations, or ZW1 mutations. Alternatively or in addition, one of the first and second heavy chain constant regions comprises a mutation that reduces protein A binding activity relative to the wild-type counterpart.

[0046] In some examples, the tri-specific antibody disclosed herein may bind to B7H3, CD3, and CD137. Examples include Ly1785, Ly1793, Ly1794, Ly1795, Ly1796, Ly1797, Ly1798, Ly1799, Ly1800, Ly1801, Ly1802, Ly1803, Ly1804, Ly1805, and Ly1849.

[0047] In some examples, the tri-specific antibody disclosed herein may bind to B7H3, CD3, and GITR. Examples include Ly1905, Ly1906, Ly1907, Ly1908, Ly1909, Ly1910, Ly1911, Ly1912, Ly1913, Ly1914, Ly1915, Ly1916, Ly1917, Ly1918, and Ly1933.

[0048] In some examples, the tri-specific antibody disclosed herein may bind to B7H3, CD3, and OX40. Examples include Ly1919, Ly1920, Ly1921, Ly1922, Ly1923, Ly1924, Ly1925, Ly1926, Ly1927, Ly1928, Ly1929, Ly1930, Ly1931, Ly1932, and Ly1934.

[0049] In some examples, the tri-specific antibody disclosed herein may bind to B7H3, CD137, and OX40. Examples include Ly2076, Ly2077, and Ly2078.

[0050] In some examples, the tri-specific antibody disclosed herein may bind to B7H3, CD137, and GITR. Examples include Ly2079, Ly2080, and Ly2081.

[0051] In some examples, the tri-specific antibody disclosed herein may bind to B7H3, CD3, and CD28. Examples include any one of Ly1968 to Ly2042.

[0052] In another aspect, the present disclosure features a humanized antibody specific to human B7H3. The humanized antibody comprises a heavy chain variable region (V_{H}) and a light chain variable region (V_{L}). In some examples, the V_{H} Comprises a framework of IGHV1-46*01 and heavy chain complementary determining regions (CDRs) 1, 2, and 3, which are either identical to those of parent murine antibody Ly383 or collectively contain no more than 5 amino acid residue variations relative to the parent murine antibody Ly383. In other examples, the V_{H} comprises a framework of IGHV1-2*02 and heavy chain CDRs 1, 2, and 3, which are either identical to those of parent murine antibody Ly387 or collectively contain no more than 5 amino acid residue variations relative to the parent murine antibody Ly387.

[0053] Alternatively or in addition, the V_{L} comprises a framework of IGKV3-11*01 and light chain CDRs 1, 2, and 3, which are either identical to those of the parent murine antibody Ly383 or Ly387 or collectively contain no more than 5 amino acid residue variations relative to the parent murine antibody Ly383 or Ly387.

[0054] In some examples, the antibody comprises the same heavy chain CDRs 1, 2, and 3 as antibody Ly383, and/or the same light chain CDRs 1, 2, and 3 of antibody Ly383. In some examples, the antibody comprises the same heavy chain CDRs 1, 2, and 3 as antibody Ly387, and/or the same light chain CDRs 1, 2, and 3 of antibody Ly387.

[0055] Any of the humanized antibodies disclosed herein may comprise a V_{H} that comprises one or more mutations in the V_{H} framework. The mutations in the V_{H} framework can be back mutations based on amino acid residues in the parent murine antibody at corresponding positions.

[0056] Any of the anti-B7H3 antibodies listed in Table 2 is within the scope of the present disclosure. In specific examples, the V_{H} comprises the amino acid sequence of SEQ ID NO: 35, 39, 47 or 49; and/or wherein the V_{L} comprises the amino acid sequence of SEQ ID NO: 37 or 41. Alternatively, the V_{H} comprises the amino acid sequence of SEQ ID NO: 43; and/or wherein the V_{L} comprises the amino acid sequence of SEQ ID NO: 45.

[0057] Any of the humanized antibodies disclosed herein may be a full-length antibody. In some examples, the full-length antibody is an IgG/kappa molecule. In some specific examples, the full-length antibody comprises a heavy chain that is an IgG1, IgG2, or IgG4 chain. In some instances, the heavy chain comprises a mutated Fc region, which exhibits altered binding affinity or selectivity to an Fc receptor as relative to the wild-type counterpart. Exemplary humanized anti-B7H3 antibodies include Ly1426, Ly1562, Ly1612, Ly1614, Ly1616, Ly1618, and Ly1442.

[0058] The present disclosure also features a pharmaceutical composition comprising any of the multi-specific antibodies or humanized anti-B7H3 antibodies disclosed herein and a pharmaceutically acceptable carrier.

[0059] In another aspect, the present disclosure features a nucleic acid or a nucleic acid set, which collectively encodes an antibody of any one of the preceding claims. In some instances, the nucleic acid or nucleic acid set can be an expression vector or an expression vector set.

[0060] Further, the present disclosure features a host cell, comprising the nucleic acid or nucleic acid set disclosed herein. In some examples, the host cell is a mammalian host cell.

[0061] In addition, the present disclosure features a method for producing any of the multi-specific antibodies or the humanized anti-B7H3 antibodies disclosed herein. The method may comprise: (i) culturing any of the host cells disclosed herein under conditions allowing for expression of the antibody; and (ii) harvesting the antibody thus produced.

[0062] In other aspects, the present disclosure also features a method for modulating immune responses, comprising administering an effective amount of any of the multi-specific and/or humanized anti-B7H3 antibodies, or the pharmaceutical composition comprising such, to a subject in need thereof. In some examples, the subject is a human patient having or suspected of having cancer.

[0063] Also within the scope of the present disclosure are any of the multi-specific and/or humanized anti-B7H3 antibodies for use in modulating immune responses or treating cancer, as well as using such antibodies for manufacturing a medicament for treatment of the target disease.

[0064] The details of one or more embodiments of the invention are set forth in the description below. Other features or advantages of the present invention will be apparent from the following drawings and detailed description of several embodiments, and also from the appended claims.

### BRIEF DESCRIPTION OF THE DRAWINGS

[0065] The following drawings form part of the present specification and are included to further demonstrate certain aspects of the present disclosure, which can be better understood by reference to the drawing in combination with the detailed description of specific embodiments presented herein.

[0066] FIGS. 1A-1D are charts showing binding activity of anti-B7H3 antibodies as indicated to human B7H3 expressed on CHO cells. Binding of these anti-B7H3 antibodies are indicated by the mean fluorescence intensity (MFI). FIG. 1A: Clones Ly1426 and Ly383 at the concentrations as indicated. FIG. 1B: Clones Ly1562 and Ly383 at the concentrations as indicated. FIG. 1C: Clones Ly1442 and Ly387 at the concentrations as indicated. FIG. 1D: Clones Ly1612, Ly1614, Ly1616 and Ly1618 at the concentrations as indicated.

[0067] FIGS. 2A-2D are charts showing B7H3 or CD40 binding activity of anti-B7H3/CD40 bispecific antibodies as indicated to human B7H3 expressed on CHO cells. Binding of these anti-B7H3/CD40 bispecific antibodies are indicated by the mean fluorescence intensity (MFI).

[0068] FIG. 2A: B7H3 binding activity of Clones Ly1581, Ly1660, Ly1661, Ly1662, Ly1663, and Ly383 at the concentrations as indicated. FIG. 2B: B7H3 binding activity of Clones Ly1578, Ly1579, Ly1581, Ly1583, Ly1585, and Ly383 at the concentrations as indicated. FIG. 2C: CD40 binding activity of Clones Ly1581, Ly1660, Ly1661, Ly1662, Ly1663, and Ly253-G2 (CD40 Ab1) at the concentrations as indicated. FIG. 2D: CD40 binding activity of Clones Ly1578, Ly1579, Ly1581, Ly1583, Ly1585, and Ly253-G2 (CD40 Ab1) at the concentrations as indicated.

[0069] FIGS. 3A-3F are charts showing stimulation of human CD40 activation as indicated by IL8 secretion in a reporter assay by a number of anti-B7H3/CD40 antibodies. The agonistic activity of these bispecific antibodies was evaluated either without or with co-cultured B7H4 overexpressing CHO cells. The various antibodies are indicated on the x-axis, and the CD40 activation signal are indicated on the y-axis. FIG. 3A: Clones Ly1578, Ly1579, Ly1581, Ly1583, Ly253-G2, Ly383 and Ly387 at the concentrations as indicated for activating CD40 without co-cultured B7H3 overexpressing CHO cells. FIG. 3B: Clones Ly1578, Ly1579, Ly1581, Ly1583, Ly253-G2, Ly383 and Ly387 at the various concentrations as indicated for activating CD40 with co-cultured B7H3 overexpressing CHO cells. FIG. 3C: Clones Ly1585, Ly1587, Ly253-G2, Ly383 and Ly387 at the various concentrations as indicated for activating CD40 without co-cultured B7H3 overexpressing CHO cells. FIG. 3D: Clones Ly1585, Ly1587, Ly253-G2, Ly383 and Ly387 at the various concentrations as indicated for activating CD40 with co-cultured B7H3 overexpressing CHO cells. FIG. 3E: Clones Ly1581, Ly1660, Ly1661, Ly1662, Ly1663, Ly1679, Ly253-G2, Ly1612 and Ly383 at the various concentrations as indicated for activating CD40 without co-cultured B7H3 overexpressing CHO cells. FIG. 3F: Clones Ly1581, Ly1660, Ly1661, Ly1662, Ly1663, Ly1679, Ly253-G2, Ly1612 and Ly383 at the various concentrations as indicated for activating CD40 with co-cultured B7H3 overexpressing CHO cells.

[0070] FIGS. 4A-4C are a set of graphs showing the anti-tumor activity of anti-B7H3/CD40 antibodies in a human CD40 knock-in mouse syngeneic model with human B7H3-expressing tumor cells. FIG. 4A: anti-tumor effects in MC38-hB7H3 model of clones Ly1581, Ly1585, Ly1579, and Ly253-G2 at 10 mg/kg administered on day 0, 20 and 27 by intraperitoneal injection. FIG. 4B: anti-tumor effects in MC38-hB7H3 model of clones Ly1581, Ly1662, Ly1663, and Ly253-G2 at 10 mg/kg as shown administered on day 0, 20 and 27 by intraperitoneal injection. FIG. 4C: Clones Ly1581, Ly1585, Ly1579, and Ly253-G2 at 10 mg/kg administered on day 0, 20 and 27 by intraperitoneal injection.

[0071] FIGS. 5A-5C include diagrams showing representative bispecific antibody 2-chain formats. FIG. 5A: 2^{nd} antibody in scFv format fused to the C-terminus of the heavy chain of the 1^{st} antibody. FIG. 5B: 2^{nd} antibody in scFv format fused to the N-terminus of the heavy chain of the 1S antibody. FIG. 5C: 2^{nd} antibody in scFv format fused to the light chain of the 1^{st} antibody.

[0072] FIGS. 6A-6D include diagrams showing representative bispecific antibody 3-chain formats. FIG. 6A: 2^{nd} antibody in scFv format fused to a heavy chain of the 1^{st} antibody, in the middle of CH1 and Fc regions. FIG. 6B: 2^{nd} antibody in scFv format fused to the C-terminus of the Fc region of the 1^{st} antibody. FIG. 6C: V_{H} and V_{L} of 2^{nd} antibody each fused with a heavy chain of the 1^{st} antibody, between CH1 and CH3 regions. FIG. 6D: V_{H} and V_{L} of 2^{nd} antibody each fused with a heavy chain of the 1^{st} antibody, in middle of CH1 and Fc regions. In each of these representative formats, the Fc regions may contain mutations enhancing heterodimerization (e.g., KiH, Charge, or ZW) and/or reducing binding affinity to protein A (pA mut).

[0073] FIGS. 7A-7D include diagrams showing representative bispecific antibody 4-chain formats. FIG. 7A: 1^{st} and 2^{nd} antibodies in heterodimer format with knob-in-hole (KiH) and pA mut mutations. FIG. 7B: 1^{st} and 2^{nd} antibodies in heterodimer format with Charge and pA mut mutations. FIG. 7C: 1^{st} and 2^{nd} antibodies in heterodimer format with ZW1/ZW2 and pA mut mutations. FIG. 7D: 2^{nd} antibody in Fab format with one chain fused to one heavy chain of the 1^{st} antibody (between CH1 and Fc). In any of these formats, the V_{H} and V_{L} fragments of the 2^{nd} antibody may be in CrossMab form.

[0074] FIGS. 8A-8B include diagrams showing representative bispecific antibodies using TCRα and TCRβ fragments. FIG. 8A: V_{H} and V_{L} of 2^{nd} antibody each fused to one of a TCRα and a TCRβ fragment for dimerization. The V_{H} chain is further fused to an Fc region, which form a dimer with the heavy chain of the 1S antibody. FIG. 8B: V_{H} and V_{L} of 2^{nd} antibody each fused to one of a TCRα and a TCRβ fragment for dimerization. One of the two chains is further fused to a heavy chain of the 1^{st} antibody (between CH1 and Fc regions).

[0075] FIGS. 9A-9D include diagrams showing representative tri-specific antibody formats (4-chain). FIG. 9A: 2^{nd} antibody in Fab form and 3^{rd} antibody in scFv form. One scFv chain is fused with one heavy chain of the 1^{st} antibody and one scFv chain is fused with another heavy chain of the 1^{st} antibody, which further includes one of the Fab chain. FIG. 9B: 2^{nd} antibody in Fab form and 3^{rd} antibody in scFv form. One scFv chain is fused with a heavy chain of the 1^{st} antibody, which further includes one of the Fab chain. FIG. 9C: 2^{nd} antibody in Fab form and 3^{rd} antibody in scFv form. One scFv chain is fused with a heavy chain of the 1^{st} antibody and one Fab chain is fused with another heavy chain of the 1^{st} antibody. FIG. 9D: 2^{nd} antibody in Fab form and 3^{rd} antibody in V_{H}/V_{L} format (separate chains). One of the V_{H} and V_{L} fragments is fused with one heavy chain of the 1^{st} antibody and the other one is fused with another heavy chain of the 1^{st} antibody, which further includes one of the Fab chain. In any of these formats, the V_{H} and V_{L} fragments of the 2^{nd} antibody may be in CrossMab form. In each of these representative formats, the Fc regions may contain mutations enhancing heterodimerization (e.g., KiH, Charge, or ZW) and/or reducing binding affinity to protein A (pA mut).

[0076] FIGS. 10A-10C include diagrams showing representative tri-specific antibody formats (3-chain). FIG. 10A: 2^{nd} and 3^{rd} antibodies both in scFv form, one being fused with a heavy chain of the 1^{st} antibody and the other being fused with the other heavy chain of the 1^{st} antibody (between CH1 and Fc). FIG. 10B: 2^{nd} and 3^{rd} antibodies both in scFv form, one being fused with a heavy chain of the 1^{st} antibody and the other being fused with the other heavy chain of the 1^{st} antibody (between CH1 and Fc), which further includes a copy of the 3^{rd} antibody scFv. FIG. 10C: 2^{nd} and 3^{rd} antibodies both in scFv form, both being fused with a heavy chain of the 1^{st} antibody (one between CH1 and Fc and the other one at the C-terminus). In each of these representative formats, the Fc regions may contain mutations enhancing heterodimerization (e.g., KiH, Charge, or ZW) and/or reducing binding affinity to protein A (pA mut).

[0077] FIGS. 11A-11E include diagrams showing representative tri-specific antibody formats (3-chain). FIG. 11A: 2^{nd} antibody in V_{H}/V_{L} form (separate chains) and 3^{rd} antibody in scFv form. Each of the V_{H} and V_{L} fragments is fused with one heavy chain of the 1^{st} antibody, which further includes a scFv chain. FIGS. 11B and 11C: 2^{nd} antibody in V_{H}/V_{L} form (separate chains) and 3^{rd} antibody in scFv form. Each of the V_{H} and V_{L} fragments is fused with one heavy chain of the 1^{st} antibody. One of the heavy chains further includes a scFv chain. In each of these representative formats, the Fc regions may contain mutations enhancing heterodimerization (e.g., KiH, Charge, or ZW) and/or reducing binding affinity to protein A (pA mut). FIG. 11D: both 2^{nd} antibody and 3^{rd} antibody in V_{H}/V_{L} form (separate chains), each fused with one heavy chain of the 1S antibody. FIG. 11E: 2^{nd} antibody in V_{H}/V_{L} form (separate chains) and 3^{rd} antibody in scFv form. Each of V_{H} and V_{L} fragments is fused with one heavy chain of the 1^{st} antibody and a scFv chain is fused with each of the light chains of the 1^{st} antibody.

[0078] FIGS. 12A-12D include diagrams showing representative tri-specific antibody formats (3-chain or 4-chain). FIG. 12A: both 2^{nd} and 3^{rd} antibodies are in scFv form, each being fused with one heavy chain of the 1^{st} antibody. FIG. 12B: both 2^{nd} and 3^{rd} antibodies are in Fab form, one chain of each Fab is fused with one chain of the other Fab. FIG. 12C: 2^{nd} antibody in V_{H}/V_{L} form (separate chains) and 3^{rd} antibodies in Fab form. One of the V_{H} and V_{L} is fused with one heavy chain of the 1^{st} antibody and the other is fused with one chain of the Fab. FIG. 12D: 2^{nd} antibody in V_{H}/V_{L} form (separate chains) and 3^{rd} antibodies in Fab form. One of the V_{H} and V_{L} is fused with one heavy chain of the 1^{st} antibody and the other is fused with one chain of the Fab. The fusion chain further includes a V_{H}-CH1 fragment of the 1 antibody. In any of these formats, the V_{H} and V_{L} fragments of the 2^{nd} antibody may be in CrossMab form. In each of these representative formats, the Fc regions may contain mutations enhancing heterodimerization (e.g., KiH, Charge, or ZW) and/or reducing binding affinity to protein A (pA mut).

[0079] FIGS. 13A-13C include diagrams showing representative tri-specific antibody formats (2-chain or 3-chain format). FIGS. 13A-13B: both 2^{nd} and 3^{rd} antibodies are in scFv format, eaching being fused with the heavy chains and the light chains of the 1V antibody. FIG. 13C: both 2^{nd} and 3^{rd} antibodies are in scFv format, each being fused with one heavy chain of the 1^{st} antibody.

### DETAILED DESCRIPTION OF THE INVENTION

[0080] Provided herein are antibodies (e.g., humanized antibodies) specific to human B7H3 (i.e., anti-B7H3 antibodies). Also provided herein are multi-specific antibodies (e.g., bi-specific and tri-specific antibodies) comprising a first antigen binding moiety specific to B7H3 and one or more (e.g., a second and optionally a third) antigen binding moieties specific to an immune modulator, for example, CD40, CD137, GITR, OX40, CD47, CD3, or CD28. Such anti-B7H3 antibodies and multi-specific antibodies have various therapeutic, diagnostic, or research applications. For example, the antibodies may be used in modulating immune responses, such as anti-tumor immune responses, in subjects in need of such treatment. Such antibodies may also be used in cancer treatment or cancer diagnosis.

[0081] As used herein, an antibody (interchangeably used in plural form) refers to an immunoglobulin molecule capable of specific binding to a target, e.g., any of the target antigens disclosed herein, through at least one antigen recognition site, located in the variable region of the immunoglobulin molecule. As used herein, the term “antibody” encompasses not only intact (i.e., full-length) polyclonal or monoclonal antibodies, but also antigen-binding fragments thereof (such as Fab, Fab′, F(ab′)2, Fv), single chain (scFv), mutants thereof, fusion proteins comprising an antibody portion, humanized antibodies, chimeric antibodies, diabodies, nanobodies, linear antibodies, single chain antibodies, multispecific antibodies (e.g., bispecific antibodies) and any other modified configuration of the immunoglobulin molecule that comprises an antigen recognition site of the required specificity, including glycosylation variants of antibodies, amino acid sequence variants of antibodies, and covalently modified antibodies. An antibody includes an antibody of any class, such as IgD, IgE, IgG, IgA, or IgM (or sub-class thereof), and the antibody need not be of any particular class. Depending on the antibody amino acid sequence of the constant domain of its heavy chains, immunoglobulins can be assigned to different classes. There are five major classes of immunoglobulins: IgA, IgD, IgE, IgG, and IgM, and several of these may be further divided into subclasses (isotypes), e.g., IgG1, IgG2, IgG3, IgG4, IgA1 and IgA2. The heavy-chain constant domains that correspond to the different classes of immunoglobulins are called alpha, delta, epsilon, gamma, and mu, respectively. The subunit structures and three-dimensional configurations of different classes of immunoglobulins are well known.

[0082] A typical antibody molecule comprises a heavy chain variable region (V_{H}) and a light chain variable region (V_{L}), which are usually involved in antigen binding. The V_{H} and V_{L} regions can be further subdivided into regions of hypervariability, also known as “complementarity determining regions” (“CDR”), interspersed with regions that are more conserved, which are known as “framework regions” (“FR”). Each V_{H} and V_{L} is typically composed of three CDRs and four FRs, arranged from amino-terminus to carboxy-terminus in the following order: FR1, CDR1, FR2, CDR2, FR3, CDR3, FR4. The extent of the framework region and CDRs can be precisely identified using methodology known in the art, for example, by the Kabat definition, the Chothia definition, the AbM definition, and/or the contact definition, all of which are well known in the art. See, e.g., Kabat, E. A., et al. (1991) Sequences of Proteins of Immunological Interest, Fifth Edition, U.S. Department of Health and Human Services, NIH Publication No. 91-3242, Chothia et al., (1989) Nature 342:877; Chothia, C. et al. (1987) J. Mol. Biol. 196:901-917, Al-lazikani et al (1997) J. Molec. Biol. 273:927-948; and Almagro, J. Mol. Recognit. 17:132-143 (2004). See also hgmp.mrc.ac.uk and bioinf.org.uk/abs.

[0083] The antibodies described herein can be murine, rat, human, or any other origin (including chimeric or humanized antibodies). Such antibodies are non-naturally occurring, i.e., would not be produced in an animal without human act (e.g., immunizing such an animal with a desired antigen or fragment thereof or isolated from antibody libraries).

[0084] Any of the antibodies described herein can be either monoclonal or polyclonal. A “monoclonal antibody” refers to a homogenous antibody population and a “polyclonal antibody” refers to a heterogeneous antibody population. These two terms do not limit the source of an antibody or the manner in which it is made.

### I. Humanized Anti-B7H3 Antibodies

[0085] In some aspects, the present disclosure provides antibodies specific to a glucocorticoid induced TNFR-related (B7H3) polypeptide (“anti-B7H3 antibodies), which may be of any source, for example, human and/or monkey B7H3. Such anti-B7H3 antibodies may specifically bind B7H3 of a particular species (e.g., human B7H3). Alternatively, the anti-B7H3 antibodies described herein may cross-react with B7H3 antigens of different species (e.g., binding to both human and monkey B7H3). In some instances, the anti-B7H3 antibodies described herein can bind cell surface B7H3, for example, B7H3 expressed on cells (e.g., immune cells) that naturally express B7H3 on the surface.

[0086] B7H3, also known as CD276, is expressed on immune cells (such as antigen-presenting cells or macrophages) and tumor cells and has inhibitory roles on T cells, contributing to tumor cell immune evasion. Recent studies have shown that B7H3 is a crucial player in tumor growth and metastasis beyond the immune regulatory roles. Inhibition of B7H3 is a potential therapeutic strategy for B7H3 overexpressing tumors. B7H3 is a protein well known in the art. For example, the structural information of human B7H3 can be find under Gene ID: 80381.

[0087] In some embodiments, the anti-B7H3 antibodies disclosed herein are humanized antibodies derived from a non-human parent antibody clone, for example, a murine antibody binding to B7H3 such as human B7H3. Humanized antibodies refer to forms of non-human (e.g., murine) antibodies that are specific chimeric immunoglobulins, immunoglobulin chains, or antigen-binding fragments thereof that contain minimal sequence derived from the non-human immunoglobulin parent. For the most part, humanized antibodies are human immunoglobulins (recipient antibody), in which residues from a CDR of the recipient are replaced by residues from a CDR of a non-human species (donor antibody) such as mouse, rat, or rabbit having the desired specificity, affinity, and capacity. In some instances, one or more Fv framework region (FR) residues of the human immunoglobulin are replaced by corresponding non-human residues. Furthermore, the humanized antibody may comprise residues that are found neither in the recipient antibody nor in the imported CDR or framework sequences, but are included to further refine and optimize antibody performance. In general, the humanized antibody will comprise substantially all of at least one, and typically two, variable domains, in which all or substantially all of the CDR regions correspond to those of a non-human immunoglobulin and all or substantially all of the FR regions are those of a human immunoglobulin consensus sequence.

[0088] The humanized antibody may also comprise at least a portion of an immunoglobulin constant region or domain (Fc), typically that of a human immunoglobulin. Antibodies may have Fc regions modified as described in WO 99/58572. Other forms of humanized antibodies have one or more CDRs (one, two, three, four, five, or six) which are altered with respect to the original antibody. This is also termed one or more CDRs “derived from” one or more CDRs from the original antibody. Humanized antibodies may also involve affinity maturation.

[0089] Methods for constructing humanized antibodies are also well known in the art. See, e.g., Queen et al., Proc. Natl. Acad. Sci. USA, 86:10029-10033 (1989). In one example, variable regions of V_{H} and V_{L} of a parent non-human antibody are subjected to three-dimensional molecular modeling analysis following methods known in the art. Next, framework amino acid residues predicted to be important for the formation of the correct CDR structures are identified using the same molecular modeling analysis. In parallel, human V_{H} and V_{L} chains having amino acid sequences that are homologous to those of the parent non-human antibody are identified from any antibody gene database using the parent V_{H} and V_{L} sequences as search queries. Human V_{H} and V_{L} acceptor genes are then selected.

[0090] The CDR regions within the selected human acceptor genes can be replaced with the CDR regions from the parent non-human antibody or functional variants thereof. When necessary, residues within the framework regions of the parent chain that are predicted to be important in interacting with the CDR regions can be used to substitute for the corresponding residues in the human acceptor genes.

[0091] In some embodiments, the anti-B7H3 antibodies disclosed herein are humanized antibodies derived from murine parent clone Ly383, which are disclosed in Example 1 below. Such a humanized antibody may comprise a heavy chain framework of IGHV1-2*02 and/or a light chain framework of IGKV3-11*01. In addition, such a humanized antibody may comprise the same heavy chain and/or light chain complementary determining regions (CDRs) as the murine parent clone. Alternatively, the humanized anti-B7H3 antibodies, which may comprise the heavy chain framework of IGHV1-2*02 and/or a light chain framework of IGKV3-11*01, may comprise one or more amino acid residue variations in one or more CDR regions as relative to the corresponding CDR regions of the murine parent Ly383. For example, the humanized antibody may comprise up to 5 (e.g., up to 4, 3, 2, or 1) amino acid residues in the three heavy chain CDRs collectively. In other examples, the humanized antibody may comprise up to 5 (e.g., up to 4, 3, 2, or 1) amino acid residues in the three light chain CDRs collectively. In yet other examples, the humanized antibody may comprise up to 8 (e.g., up to 7, 6, 5, 4, 3, 2, or 1) amino acid residues in the three heavy chain CDRs and the three light chain CDRs collectively.

[0092] In some embodiments, the anti-B7H3 antibodies disclosed herein are humanized antibodies derived from murine parent clone Ly387, which are disclosed in Example 1 below. Such a humanized antibody may comprise a heavy chain framework of IGHV4-59*01 and/or a light chain framework of IGKV3-11*01. In addition, such a humanized antibody may comprise the same heavy chain and/or light chain complementary determining regions (CDRs) as the murine parent clone. Alternatively, the humanized anti-B7H3 antibodies, which may comprise the heavy chain framework of IGHV1-2*02 and/or a light chain framework of IGKV3-11*01, may comprise one or more amino acid residue variations in one or more CDR regions as relative to the corresponding CDR regions of the murine parent Lyv396. For example, the humanized antibody may comprise up to 5 (e.g., up to 4, 3, 2, or 1) amino acid residues in the three heavy chain CDRs collectively. In other examples, the humanized antibody may comprise up to 5 (e.g., up to 4, 3, 2, or 1) amino acid residues in the three light chain CDRs collectively. In yet other examples, the humanized antibody may comprise up to 8 (e.g., up to 7, 6, 5, 4, 3, 2, or 1) amino acid residues in the three heavy chain CDRs and the three light chain CDRs collectively.

[0093] Alternatively or in addition, the amino acid residue variations can be conservative amino acid residue substitutions. As used herein, a “conservative amino acid substitution” refers to an amino acid substitution that does not alter the relative charge or size characteristics of the protein in which the amino acid substitution is made. Variants can be prepared according to methods for altering polypeptide sequence known to one of ordinary skill in the art such as are found in references which compile such methods, e.g. Molecular Cloning: A Laboratory Manual, J. Sambrook, et al., eds., Second Edition, Cold Spring Harbor Laboratory Press, Cold Spring Harbor, New York, 1989, or Current Protocols in Molecular Biology, F. M. Ausubel, et al., eds., John Wiley & Sons, Inc., New York. Conservative substitutions of amino acids include substitutions made amongst amino acids within the following groups: (a) M, I, L, V; (b) F, Y, W; (c) K, R, H; (d) A, G; (e) S, T; (f) Q, N; and (g) E, D.

[0094] In some embodiments, any of the humanized anti-B7H3 antibodies may comprise the same framework as those encoded by the human acceptor germline V_{H} and/or V_{L} gene. In other embodiments, the framework region of the humanized antibodies may comprise one or more mutations relative to those encoded by the human acceptor germline V_{H} and/or V_{L} gene. For example, one or more positions in the framework region of the V_{H} and/or V_{L} chain of a humanized antibody may contain one or more back mutations, which refer to changing a residue in the human acceptor germline gene back to the residue at the corresponding position of the murine parent. For example, humanized antibodies derived from murine parent clone Ly383 may comprise mutations (e.g., back mutations) at one or more of positions A40 (e.g., A40K), M48 (e.g., M48I), V68 (e.g., V68A), R72 (e.g., R72S), and/or T74 (e.g., T74K) in the heavy chain framework regions, and mutations (e.g., back mutations) at one or more of positions P45 (e.g., P45L), W46 (e.g., W46L), R65 (e.g., R65G), and/or Y70 (e.g., Y70F) in the heavy chain framework regions. In some examples, the humanized anti-B7H3 antibodies disclosed herein may comprise any of the heavy chain and light chain CDRs disclosed herein (e.g., any of the CDR combinations provided in Example 3 below). In addition, such a humanized anti-B7H3 antibody may comprise a heavy chain framework at least 80% (e.g., at least 85%, 90%, 95% or above) identical to the heavy chain framework region of IGHV1-2*02. Alternatively or in addition, the humanized anti-B7H3 antibody may comprise a light chain framework at least 80% (e.g., at least 85%, 90%, 95% or above) identical to the light chain framework region of IGKV3-11*01.

[0095] Any of the anti-B7H3 antibodies described herein may be a full-length antibody, which contains two heavy chains and two light chains, each including a variable domain and a constant domain. Alternatively, the heavy chain constant region of the antibodies described herein may comprise a single domain (e.g., CH1, CH2, or CH3) or a combination of any of the single domains. Antibody heavy and light chain constant regions are well known in the art, e.g., those provided in the IMGT database (www.imgt.org) or at www.vbase2.org/vbstat.php., both of which are incorporated by reference herein.

[0096] Alternatively, the antibodies disclosed herein can be an antigen-binding fragment of a full-length antibody. Examples of binding fragments encompassed within the term “antigen-binding fragment” of a full length antibody include (i) a Fab fragment, a monovalent fragment consisting of the V_{L}, V_{H}, C_{L} and C_{H}1 domains; (ii) a F(ab′)₂ fragment, a bivalent fragment including two Fab fragments linked by a disulfide bridge at the hinge region; (iii) a Fd fragment consisting of the V_{H} and C_{H}1 domains; (iv) a Fv fragment consisting of the V_{L} and V_{H} domains of a single arm of an antibody, (v) a dAb fragment (Ward et al., (1989) Nature 341:544-546), which consists of a V_{H} domain; and (vi) an isolated complementarity determining region (CDR) that retains functionality. Furthermore, although the two domains of the Fv fragment, V_{L} and V_{H}, are coded for by separate genes, they can be joined using recombinant methods, by a synthetic linker that enables them to be made as a single protein chain in which the V_{L} and V_{H} regions pair to form monovalent molecules known as single chain Fv (scFv). See e.g., Bird et al. (1988) Science 242:423-426; and Huston et al. (1988) Proc. Natl. Acad. Sci. USA 85:5879-5883.

[0097] In some embodiments, the anti-B7H3 antibody is Ly383 disclosed in Example 1 below or a functional variant derived therefrom. Ly383 or a functional variant thereof may comprise V_{H} and V_{L} chains fused to a human heavy chain constant region and a human light chain constant region, respectively. The human heavy chain constant region may be from an IgG molecule and/or the human light chain constant region may be from a kappa chain. The heavy chain constant domain may be derived from a suitable Ig isoform, for example, a human IgG1, IgG2, or IgG4 molecule. In some embodiments, the constant domain may comprise one or more mutations in the Fc region to enhance or reduce binding affinity and/or binding specificity to an Fc receptor. Examples are provided herein or disclosed in WO/2018/183520 and PCT/US2019/053505 (filed on Sep. 27, 2019), the relevant disclosures of each of which are incorporated by reference for the purpose and subject matter referenced herein. Such a recombinant antibody may further comprise the same light chain variable region of TM676 fused to a human light chain constant region, for example, a kappa chain constant region.

[0098] In some embodiments, the anti-B7H3 antibody is Ly387 disclosed in Example 1 below or a functional variant derived therefrom. Ly387 or a functional variant thereof may comprise V_{H} and V_{L} chains fused to a human heavy chain constant region and a human light chain constant region, respectively. The human heavy chain constant region may be from an IgG molecule and/or the human light chain constant region may be from a kappa chain. The heavy chain constant domain may be derived from a suitable Ig isoform, for example, a human IgG1, IgG2, or IgG4 molecule. In some embodiments, the constant domain may comprise one or more mutations in the Fc region to enhance or reduce binding affinity and/or binding specificity to an Fc receptor. Examples are provided herein or disclosed in WO/2018/183520 and PCT/US2019/053505 (filed on Sep. 27, 2019), the relevant disclosures of each of which are incorporated by reference for the purpose and subject matter referenced herein. Such a recombinant antibody may further comprise the same light chain variable region of TM677 fused to a human light chain constant region, for example, a kappa chain constant region.

[0099] Exemplary anti-B7H3 antibodies and humanized versions thereof are provided in Example 1 and Table 2 below, which are also within the scope of the present disclosure.

### II. Multi-Specific Antibodies Comprising Anti-B7H3 Binding Moieties

[0100] In some aspects, the present disclosure also provides multi-specific antibodies comprising one antigen binding moiety specific to B7H3 and one or more additional antigen binding moieties specific to one or more additional antigens of interest, for example, an immune checkpoint or modulator molecule. Examples include, but are not limited to CD40, CD137, GITR, OX40, CD47, CD3, or CD28. In some examples, the multi-specific antibody discloses herein is a bi-specific antibody comprising one antigen binding moiety specific to B7H3 and one antigen binding moiety specific to one of antigens CD40, CD137, GITR, OX40, CD47, CD3, or CD28. In other examples, the multi-specific antibody disclosed herein is a tri-specific antibody comprising one antigen binding moiety specific to B7H3 and two additional antigen binding moieties specific to two antigens selected from CD40, CD137, GITR, OX40, CD47, CD3, or CD28.

### A. Antigen-Binding Moieties

[0101] Each antigen binding moiety in any of the multi-specific antibodies disclosed herein can be an antigen binding moiety in any form, including, but not limited to, intact (i.e., full-length) antibodies, antigen-binding fragments thereof (such as Fab, Fab′, F(ab′).sub.2, Fv, tribody, triFabs, tandem linked Fabs, a Fab-Fv, tandem linked V domains, tandem linked scFvs, and among other formats), single chain antibodies (scFv antibodies), and tetravalent antibodies. Any scFv fragment in a bi-specific or multi-specific antibody may be in V_{H}→V_{L} orientation. Alternatively, it can be in the V_{L}→V_{H} orientation.

[0102] An antigen binding moiety in any of the multi-specific antibodies disclosed herein may specifically bind to the corresponding target antigen(s) (e.g., B7H3, CD40, CD137, GITR, OX40, CD47, CD3, or CD28) or an epitope thereof. An antibody that “specifically binds” to an antigen or an epitope is a term well understood in the art. A molecule is said to exhibit “specific binding” if it reacts more frequently, more rapidly, with greater duration and/or with greater affinity with a particular target antigen than it does with alternative targets. An antibody “specifically binds” to a target antigen or epitope if it binds with greater affinity, avidity, more readily, and/or with greater duration than it binds to other substances. For example, an antibody that specifically (or preferentially) binds to an antigen (e.g., those listed above) or an antigenic epitope therein is an antibody that binds this target antigen with greater affinity, avidity, more readily, and/or with greater duration than it binds to other antigens or other epitopes in the same antigen. It is also understood with this definition that, for example, an antibody that specifically binds to a first target antigen may or may not specifically or preferentially bind to a second or third target antigen. As such, “specific binding” or “preferential binding” does not necessarily require (although it can include) exclusive binding. In some examples, an antibody that “specifically binds” to a target antigen or an epitope thereof may not bind to other antigens or other epitopes in the same antigen (i.e., only baseline binding activity can be detected in a conventional method). Alternatively, or in addition, the antibodies described herein may specifically binds the human antigen or a fragment thereof as relative to the monkey counterpart, or vice versa (e.g., having a binding affinity at least 10-fold higher to one antigen than the other as determined in the same assay under the same assay conditions). In other instances, the antibodies described herein may cross-react to human and a non-human antigen (e.g., monkey), e.g., the difference in binding affinity to the human and the non-human antigen is less than 5-fold, e.g., less than 2-fold, or substantially similar.

[0103] In some embodiments, an antigen binding moiety in any of the bi-specific or multi-specific antibodies as described herein has a suitable binding affinity for the target antigen(s) (e.g., B7H3, CD40, CD137, GITR, OX40, CD47, CD3, or CD28) or antigenic epitopes thereof. As used herein, “binding affinity” refers to the apparent association constant or K_{A}. The K_{A} is the reciprocal of the dissociation constant (K_{D}). The antibody described herein may have a binding affinity (K_{D}) of at least 10⁻⁵, 10⁻⁶, 10⁻⁷, 10⁻⁸, 10⁻⁹, 10⁻¹⁰ M, or lower for the target antigen or antigenic epitope. An increased binding affinity corresponds to a decreased K_{D}. Higher affinity binding of an antibody for a first antigen relative to a second antigen can be indicated by a higher K_{A} (or a smaller numerical value K_{D}) for binding the first antigen than the K_{A} (or numerical value K_{D}) for binding the second antigen. In such cases, the antibody has specificity for the first antigen (e.g., a first protein in a first conformation or mimic thereof) relative to the second antigen (e.g., the same first protein in a second conformation or mimic thereof; or a second protein). Differences in binding affinity (e.g., for specificity or other comparisons) can be at least 1.5, 2, 3, 4, 5, 10, 15, 20, 37.5, 50, 70, 80, 91, 100, 500, 1000, 10,000 or 10⁵ fold. In some embodiments, any of the antibodies may be further affinity matured to increase the binding affinity of the antibody to the target antigen or antigenic epitope thereof.

[0104] Binding affinity (or binding specificity) can be determined by a variety of methods including equilibrium dialysis, equilibrium binding, gel filtration, ELISA, surface plasmon resonance, or spectroscopy (e.g., using a fluorescence assay). Exemplary conditions for evaluating binding affinity are in HBS-P buffer (10 mM HEPES pH7.4, 150 mM NaCl, 0.005% (v/v) Surfactant P20). These techniques can be used to measure the concentration of bound binding protein as a function of target protein concentration. The concentration of bound binding protein ([Bound]) is generally related to the concentration of free target protein ([Free]) by the following equation:

$$[ Bound ] = [ Free ] / ( Kd + [ Free ] )$$

[0105] It is not always necessary to make an exact determination of K_{A}, though, since sometimes it is sufficient to obtain a quantitative measurement of affinity, e.g., determined using a method such as ELISA or FACS analysis, is proportional to K_{A}, and thus can be used for comparisons, such as determining whether a higher affinity is, e.g., 2-fold higher, to obtain a qualitative measurement of affinity, or to obtain an inference of affinity, e.g., by activity in a functional assay, e.g., an in vitro or in vivo assay.

[0106] The antigen binding moieties of a multi-specific antibody as disclosed herein may be derived from the parent antibody specific to B7H3 and the parent antibodies specific to the other antigens of interest listed in Table 1 below (heavy chain and light chain CDRs based on the Kabat scheme are identified in boldface).

TABLE 1
Parent Antibodies for Constructing Multi-Specific Antibodies

| Antibody | | | SED ID |
|---|---|---|---|
| Clones | | Amino acid sequence | NO: |
| B7H3 | VH | QVQLVQSGAEVKKPGASVKVSCKASGYTFTSYVMHWVRQKPGQGLEWIGYINP | 1 |
| Ab1 | | YNEGTESTDKFKGRATMTSDKSTSTVYMELSSLRSEDTAVYYCASIYYGYE | |
| | | GTYFGVWGQGTLVTVSS | |
| | VL | EIVLTQSPATLSLSPGERATLSCRASSSVSYMHWYQQKPGQAPRPWIYATSN | 2 |
| | | LASGIPARFSGSRSGTDYTLTISSLEPEDFAVYYCQQWSSNTLTFGGGTKVEI | |
| | | K | |
| B7H3 | VH | QVQLVQSGAEVKKPGASVKVSCKASGYTFTSYWMHWVRQAPGQGLEWMGMIHP | 3 |
| Ab2 | | NSGGTNYNEKFKGRVTMTRDTSISTAYMELSRLRSDDTAVYYCARSQATWF | |
| | | AYWGQGTLVTVSS | |
| | VL | EIVLTQSPATLSLSPGERATLSCRASSSVSSSYLHWYQQKPGQAPRLLIYST | 4 |
| | | SNLASGIPARFSGSGSGTDFTLTISSLEPEDFAVYYCQHYSGYPLTFGGGTKV | |
| | | EIK | |
| CD40 | VH | QVQLVQSGAEVKKPGASVKVSCKASGYTFTGYYMHWVRQAPGQGLEWMGWINP | 5 |
| Ab1 | | DSGGTNYAQKFQGRVTMTRDTSISTAYMELNRLRSDDTAVYYCARDQPLGY | |
| | | CTNGVCSYFDYWGQGTLVTVSS | |
| | VL | DIQMTQSPSSVSASVGDRVTITCRASQGIYSWLAWYQQKPGKAPNLLIYTAS | 6 |
| | | TLQSGVPSRFSGSGSGTDFTLTISSLQPEDFATYYCQQANIFPLTFGGGTKVE | |
| | | IK | |
| CD137 | VH | QVQLVQSGAEVKKPGASVKVSCKASGYTFAGFEMHWVRQAPGQGLEWMGAIDP | 7 |
| Ab1 | | KTGGTDYNQKFKDRVTMTRDTSISTAYMELSRLRSDDTAVYYCARDLGYFD | |
| | | VWGQGTLVTVSS | |
| | VL | DIQMTQSPSSLSASVGDRVTITCRASQDIRSNLNWYQQKPGGAVKLLIYYTS | 8 |
| | | RLHSGVPSRFSGSGSGTDYTLTISSLQPEDFATYFCQQSEKLPRTFGGGTKVE | |
| | | IR | |
| GITR | VH | QVQLQESGPGLVKPSETLSLTCTVSGFSLTSYNVHWIRQPPGKGLEWIGVIWS | 9 |
| Ab1 | | GVRTDYNSVLKPRVTISVDTSKNQFSLKLSSVTAADTAVYYCARGTYDDNY | |
| | | HDVMDAWGQGTLVTVSS | |
| | VL | EIVLTQSPATLSLSPGERATLSCRASKSVRTGMHWYQQKPGQAPRLLIYGAS | 10 |
| | | NLESGIPARFSGSGSGTDFTLTISSLEPEDFAVYYCQQSWNHFTFGQGTKLEI | |
| | | K | |
| OX40 | VH | EVQLVQSGAEVKKPGASVKVSCKASGYTFTDSYMSWVRQAPGQGLEWIGDMYP | 11 |
| Ab1 | | DNGDSSYNQKFRERVTITRDTSTSTAYLELSSLRSEDTAVYYCVLAPRWYF | |
| | | SVWGQGTLVTVSS | |
| | VL | DIQMTQSPSSLSASVGDRVTITCRASQDISNYLNWYQQKPGKAPKLLIYYTS | 12 |
| | | RLRSGVPSRFSGSGSGTDFTLTISSLQPEDFATYYCQQGHTLPPTFGQGTKVE | |
| | | IK | |
| CD28 | VH | QVQLVQSGAEVVKPGASVKVSCKASGYTFTSYYIHWVRQAPGQGLEWIGSIYP | 13 |
| Ab1 | | GNVNTNYAQKFQGRATLTVDTSISTAYMELSRLRSDDTAVYYCTRSHYGLD | |
| | | WNFDVWGKGTTVTVSS | |
| | VL | DIQMTQSPSSLSASVGDRVTITCQASQNIYVWLNWYQQKPGKAPKLLIYKAS | 14 |
| | | NLHTGVPSRFSGSGSGTDFTLTISSLQPEDIATYYCQQGQTYPYTFGQGTKLE | |
| | | IK | |
| CD28 | VH | QVQLVQSGAEVKKPGASVKVSCKASGYTFTSYYIHWVRQAPGQGLEWIGCIYP | 15 |
| Ab2 | | GNVNTNYNEKFKDRATLTVDTSISTAYMELSRLRSDDTAVYFCTRSHYGLD | |
| | | WNFDVWGQGTTVTVSS | |
| | VL | DIQMTQSPSSLSASVGDRVTITCHASQNIYVWLNWYQQKPGKAPKLLIYKAS | 16 |
| | | NLHTGVPSRFSGSGSGTDFTLTISSLQPEDFATYYCQQGQTYPYTFGGGTKVE | |
| | | IK | |
| CD28 | VH | QVQLQESGPGLVKPSETLSLTCTVSGGSISSYYWSWIRQPPGKGLEWIGYIYY | 17 |
| Ab3 | | SGITHYNPSLKSRVTISVDTSKIQFSLKLSSVTAADTAVYYCARWGVRRDY | |
| | | YYYGMDVWGQGTTVTVSS | |
| | VL | EIVLTQSPGTLSLSPGERATLSCRASQSVSSSYLAWYQQKPGQAPRLLIYGA | 18 |
| | | SSRATGIPDRFSGSGSGTDFTLTISRLEPEDFAVYYCQQYGSSPWTFGQGTKV | |
| | | EIK | |
| CD47 | VH | QVQLVQSGAEVKKPGASVKVSCKASGYTFTNYNMHWVRQAPGQRLEWMGTIYP | 19 |
| Ab1 | | GNDDTSYNQKFKDRVTITADTSASTAYMELSSLRSEDTAVYYCARGGYRAM | |
| | | DYWGQGTLVTVSS | |
| | VL | DIVMTQSPLSLPVTPGEPASISCRSSQSIVYSNGNTYLGWYLQKPGQSPQLL | 20 |
| | | IYKVSNRFSGVPDRFSGSGSGTDFTLKISRVEAEDVGVYYCFQGSHVPYTFG | |
| | | QGTKLEIK | |
| CD47 | VH | KVQLVESGGGLVKPGGSLRLSCAASGFTFSNAWMNWVRQAPGKGLEWVGRIKR | 21 |
| Ab2 | | KTDGETTDYAAPVKGRFSISRDDSKNTLYLQMNSLKTEDTAVYYCAGSNRA | |
| | | FDIWGQGTMVTVSA | |
| | VL | DIVMTQSPDSLAVSLGERATINCKSSQSVLYSSNNRNYLAWYQQKPGQPPKL | 22 |
| | | LINQASTRASGVPDRFSGSGSGTEFTLIISSLHAEDVAIYYCQQYYTPPLAF | |
| | | GGGTKLEIK | |
| CD3 | VH | EVQLVESGGGLVQPGGSLRLSCAASGFTFSTYAMNWVRQAPGKGLEWVGRIRS | 23 |
| Ab1 | | KYNNYATYYADSVKGRFTISRDDSKNSLYLQMNSLKTEDTAVYYCVRHGNF | |
| | | GNSYVSWFAYWGQGTLVTVSS | |
| | VL | QAVVTQEPSLTVSPGGTVTLTCRSSTGAVTTSNYANWVQQKPGQAPRGLIGG | 24 |
| | | TNKRAPWTPARFSGSLLGGKAALTITGAQAEDEADYYCALWYSNLWVFGGGT | |
| | | KLTVL | |
| CD3 | VH | QVQLVQSGAEVKKPGASVKVSCKASGYTFTRYTMHWVRQAPGQGLEWMGYINP | 25 |
| Ab2 | | SRGYTNYNQKFKDRVTMTRDTSTSTVYMELSSLRSEDTAVYYCARYYDDHY | |
| | | CLDYWGQGTLVTVSS | |
| | VL | DIQMTQSPSTLSASVGDRVTITCSASSSVSYMNWYQQKPGKAPKLLIYDTSK | 26 |
| | | LASGVPSRFSGSGSGTEFTLTISSLQPDDFATYYCQQWSSNPFTFGQGTKLEI | |
| | | K | |

[0107] As used herein, an antigen binding moiety in a multi-specific antibody “derived from” a parent antibody means that the parent antibody is used as a starting material for making one antigen binding moiety in the multi-specific antibody. The antigen binding moiety may comprise the same heavy chain and/or light chain CDRs as those of the parent antibody. Two antibodies having the same V_{H} and/or V_{L} CDRs means that their CDRs are identical when determined by the same approach (e.g., the Kabat definition, the Chothia definition, the AbM definition, and/or the contact definition as known in the art).

[0108] In some instances, an antigen binding moiety derived from a parent antibody may be a functional variant of the parent antibody. Such functional variants are substantially similar to the reference antibody, both structurally and functionally. A functional variant comprises substantially the same V_{H} and V_{L} CDRs as the reference antibody. For example, it may comprise only up to 5 (e.g., 4, 3, 2, or 1) amino acid residue variations in the total heavy chain CDR regions of the reference antibody and/or comprise only up to 5 (e.g., 4, 3, 2, or 1) amino acid residue variations in the total light chain CDR regions of the reference antibody. In some examples, the functional variant may comprise up to 8 (e.g., 7, 6, 5, 4, 3, 2, or 1) amino acid residue variations in the total heavy and light chain CDRs relative to those of the reference antibody. Such functional variants may bind the same epitope of B7H3 with substantially similar affinity (e.g., having a K_{D} value in the same order). Alternatively or in addition, the amino acid residue variations are conservative amino acid residue substitutions as disclosed herein.

[0109] In some embodiments, an antigen binding moiety in a multi-specific antibody as disclosed herein may comprise heavy chain CDRs that are at least 80% (e.g., 85%, 90%, 95%, or 98%) sequence identity, individually or collectively, as compared with the V_{H} CDRs of the corresponding parent antibody. Alternatively or in addition, the antigen binding moiety may comprise light chain CDRs that are at least 80% (e.g., 85%, 90%, 95%, or 98%) sequence identity, individually or collectively, as compared with the V_{L} CDRs as the parent antibody.

[0110] In other embodiments, the antigen binding moiety may comprise heavy chain CDRs that are at least 80% (e.g., 85%, 90%, 95%, or 98%) sequence identity, individually or collectively, as compared with the V_{H} CDRs of the corresponding parent antibody. Alternatively or in addition, the antigen binding moiety may comprise light chain CDRs that are at least 80% (e.g., 85%, 90%, 95%, or 98%) sequence identity, individually or collectively, as compared with the V_{L} CDRs as the parent antibody.

[0111] The “percent identity” of two amino acid sequences is determined using the algorithm of Karlin and Altschul Proc. Natl. Acad. Sci. USA 87:2264-68, 1990, modified as in Karlin and Altschul Proc. Natl. Acad. Sci. USA 90:5873-77, 1993. Such an algorithm is incorporated into the NBLAST and XBLAST programs (version 2.0) of Altschul, et al. J. Mol. Biol. 215:403-10, 1990. BLAST protein searches can be performed with the XBLAST program, score=50, wordlength=3 to obtain amino acid sequences homologous to the protein molecules of the invention. Where gaps exist between two sequences, Gapped BLAST can be utilized as described in Altschul et al., Nucleic Acids Res. 25(17):3389-3402, 1997. When utilizing BLAST and Gapped BLAST programs, the default parameters of the respective programs (e.g., XBLAST and NBLAST) can be used.

[0112] In some embodiments, the multi-specific antibodies disclosed herein may be trivalent, tetravalent, pentavelnt, or hexavalent, which comprises one or two binding sites for B7H3 and the other antigen(s) (e.g., CD40, CD137, GITR, OX40, CD47, CD3, or CD28).

### B. Exemplary Formats for Multi-Specific Antibodies

[0113] Any of the multi-specific antibodies disclosed herein (e.g., bi-specific or tri-specific antibodies) may be in any bi-specific or multi-specific antibody format known in the art, for example, BsIgG, BsAb fragment, Bispecific fusion proteins, or BsAb conjugate. See, e.g., Mol. Immunol. 67(2):95-106 (2015), Trispecific IgG, Trispecific Ab fragment, Trispecific fusion proteins, or TsAb conjugate. See, e.g., Methods, Volume 154, 1 Feb. 2019, Pages 3-9.

### (i) Bi-Specific Antibodies

[0114] In some embodiments, the multi-specific antibodies disclosed herein are bi-specific antibodies comprising one antigen binding moiety specific to B7H3 and another antigen binding moiety specific to CD40, CD137, GITR, OX40, CD47, CD3, or CD28. Such a bi-specific antibody may be of any format known in the art. Exemplary bi-specific antibody formats are illustrated in FIGS. 5A-5C, FIGS. 6A-6D, FIGS. 7A-7D, and FIGS. 8A-8B, all of which are within the scope of the present disclosure.

[0115] In some examples, one antigen binding moiety in the bi-specific antibody (e.g., the anti-B7H3 moiety) is in a multi-chain antibody format as disclosed herein, and the other antigen binding moiety (e.g., specific to any of the other antigens of interest) can be in an scFv format. For example, the multi-chain antibody format comprises a light chain that comprises a V_{L} domain and a light chain constant region, and a heavy chain that comprises a V_{H} and a heavy chain constant domain or a fragment thereof (which optionally may comprise the CH3 domain).

[0116] In other examples, both antigen binding moieties in the bi-specific antibody may be in a a multi-chain antibody format as disclosed herein. For example, one antigen binding moiety (e.g., the anti-B7H3 moiety) may comprises a light chain that comprises a V_{L} domain and a light chain constant region, and a heavy chain that comprises a V_{H} and a heavy chain constant domain or a fragment thereof (which optionally may comprise the CH3 domain). The other antigen binding moiety (e.g., specific to the other antigen) may comprise a V_{H} fragment and a V_{L} fragment as separate chains (V_{H}/V_{L} format).

[0117] In some instances, the bi-specific antibody disclosed herein may be in a 2-chain format: comprising two different polypeptides, which collectively form the two antigen binding moieties. Such a 2-chain format bi-specific antibody may comprise multiple copies of one or both polypeptides, forming trivalent, tetravalent, pentavelnt, or hexavalent antibodies. See, e.g., FIGS. 5A-5C.

[0118] In some examples, the bi-specific antibody disclosed herein may comprise two chains: a first chain being a fusion protein of the scFv fragment of one antigen binding moiety and the heavy chain or the light chain of the other antigen binding moiety, and the second chain being the other chain of the other antigen binding moiety. For example, the bi-specific antibody may comprise a first chain that is a fusion protein of a scFv fragment of a first antigen binding moiety binding to a first antigen (e.g., CD40, CD137, GITR, OX40, CD47, CD3, or CD28) fused to the heavy chain of a second antigen binding moiety, which binds to a second antigen (e.g., B7H3), and a second chain which is the light chain of the second antigen binding moiety. In any of the fusion chains, the scFv fragment and the heavy or light chain may be in any order. In some instances, the scFv can be located at the N-terminus. In other instances, the heavy or light chain may be located at the N-terminus.

[0119] In some examples, the bi-specific antibody may be comprise two chains: (i) a first polypeptide comprising the V_{L} fragment of a first antigen binding moiety and a heavy chain comprising the V_{H} fragment of a second antigen binding moiety and an Fc fragment (e.g., a whole Fc fragment or a portion thereof such as CH2-CH3); and (ii) a second polypeptide comprising the V_{H} fragment of the first antigen binding moiety and the V_{L} fragment of the second antigen binding moiety. In the first polypeptide, the V_{L} fragment may be located at the N-terminus and the heavy chain may be located at the C-terminus. Alternatively, the V_{L} fragment may be located at the C-terminus and the heavy chain may be located at the N-terminus of the first polypeptide. Similarly, the second polypeptide may have the V_{H} fragment at the N-terminus and the V_{L} fragment at the C-terminus. Alternatively, the second polypeptide may have the V_{H} fragment at the C-terminus and the V_{L} fragment at the N-terminus.

[0120] For example, the bi-specific antibody may comprise: (i) a first polypeptide comprising the V_{L} fragment of a first antigen binding moiety that binds B7H3 and a heavy chain comprising the V_{H} fragment of a second antibody that binds CD40, CD137, GITR, OX40, CD47, CD3, or CD28 and an Fc fragment; and (ii) a second polypeptide comprising the V_{H} fragment of the first antigen binding moiety and the V_{L} fragment of the second antigen binding moiety. Alternatively, the bi-specific antibody may comprise (i) a first polypeptide comprising the V_{L} fragment of a first antigen binding moiety that binds CD40, CD137, GITR, OX40, CD47, CD3, or CD28 and a heavy chain comprising the V_{H} fragment of a second antibody that binds B7H3 and an Fc fragment; and (ii) a second polypeptide comprising the V_{H} fragment of the first antigen binding moiety and the V_{L} fragment of the second antigen binding moiety.

[0121] In other examples, the bi-specific antibody may comprise two chains: (i) a first polypeptide comprising the V_{H} fragment of a first antigen binding moiety and a heavy chain of a second antigen binding moiety (comprising the V_{H} fragment and an Fc fragment), and (ii) a second polypeptide comprising the V_{L} fragment of the first antigen binding moiety and the light chain of the second antigen binding moiety (e.g., comprising a light chain variable region and a light chain constant region). In the first polypeptide, the V_{H} fragment of the first antigen binding moiety may be located at the N-terminus. Alternatively, it may be located at the C-terminus. In the second polypeptide, the V_{L} fragment of the first antigen binding moiety may be located at the N-terminus. Alternatively, it may be located at the C-terminus. In some instances, the first antigen binding moiety binds B7H3 and the second antigen binding moiety binds CD40, CD137, GITR, OX40, CD47, CD3, or CD28. In other instances, the first antigen binding moiety binds CD40, CD137, GITR, OX40, CD47, CD3, or CD28 and the second antigen binding moiety binds B7H3.

[0122] In some instances, the bi-specific antibody disclosed herein may be in a 3-chain format: comprising three different polypeptides, which collectively form the two antigen binding moieties. Such a 3-chain format bi-specific antibody may comprise multiple copies of one or more of the polypeptides, forming trivalent, tetravalent, pentavelnt, or hexavalent antibodies. See, e.g., FIGS. 6A-6D.

[0123] In some examples, a bi-specific antibody disclosed herein comprises three polypeptides. The first polypeptide comprises the heavy chain of the first antigen binding moiety (e.g., binding to B7H3) in the bi-specific antibody fused to the light chain of the second antigen binding moiety (e.g., binding to the second antigen such as CD40, CD137, GITR, OX40, CD47, CD3, or CD28). The second and third polypeptides comprise the light chain of the first antigen binding moiety and the heavy chain of the second antigen binding moiety, respectively. In some instances, the heavy chain of the second antigen binding moiety may comprise a V_{H} fragment and a heavy chain constant region such as CH1. Alternatively, the first polypeptide comprises the heavy chain of the second antigen binding moiety (e.g., binding to the second antigen such as CD40, CD137, GITR, OX40, CD47, CD3, or CD28) fused to the light chain of the first antigen binding moiety (e.g., binding to B7H3). The second and third polypeptides comprise the light chain of the second antigen binding moiety and the heavy chain of the first antigen binding moiety, respectively. In some instances, the heavy chain of the first antigen binding moiety may comprise a V_{H} fragment and a heavy chain constant region such as CH1. In some instances, the light chain fragment in the first polypeptide can be located at the N-terminus. Alternatively, it may be located at the C-terminus.

[0124] In some embodiments, any of the bi-specific antibodies disclosed herein may be in a IgG-like format (4-chain format): one arm binding to human B7H3 and another arm binding to CD40, CD137, GITR, OX40, CD47, CD3, or CD28. Each arm comprises a heavy chain and a light chain. Structurally it is made from half of anti-B7H3 antibody and half of antibody against CD40, CD137, GITR, OX40, CD47, CD3, or CD28, with the similar size and shape as natural IgG. See, e.g., FIGS. 7A-7D.

[0125] In some embodiments, a bi-specific antibody disclosed herein may comprise V_{H} and V_{L} antibody variable regions fused to TCR constant regions, respectively. See, e.g., WO2014014796A1, 23 Jan. 2014, CN1561343A, 5 Jan. 2005, PCT/CN2018/106766, 20 Sep. 2018. See, e.g., FIGS. 8A-8B.

### (ii) Tri-Specific Antibodies

[0126] In some embodiments, the multi-specific antibodies disclosed herein are tri-specific antibodies comprising one antigen binding moiety specific to B7H3 and two additional antigen binding moieties specific to two different antigens selected from CD40, CD137, GITR, OX40, CD47, CD3, and CD28. Examples include, but are not limited to, anti-B7H3/CD3/CD137 tri-specific antibodies, anti-B7H3/CD3/GITR tri-specific antibodies, anti-B7H3/CD3/OX40 tri-specific antibodies, anti-B7H3/CD3/CD28 tri-specific antibodies, anti-B7H3/CD137/OX40 tri-specific antibodies, and anti-B7H3/CD137/GITR tri-specific antibodies. Such a tri-specific antibody may be of any format known in the art. Exemplary tri-specific antibody formats are illustrated in FIGS. 9A-9D, FIGS. 10A-10C, FIGS. 11A-11E, FIGS. 12A-12D, and FIGS. 13A-13C, all of which are within the scope of the present disclosure.

[0127] In some examples, one antigen binding moiety in the tri-specific antibody (e.g., the anti-B7H3 moiety) is in a multi-chain antibody format as disclosed herein, and the other two antigen binding moieties (e.g., specific to the other two antigens of interest) can be in an scFv format, in a Fab format, and/or in V_{H}/V_{L} format. For example, the multi-chain antibody format comprises a light chain that comprises a V_{L} domain and a light chain constant region, and a heavy chain that comprises a V_{H} and a heavy chain constant domain or a fragment thereof (which optionally may comprise the CH3 domain).

[0128] In other examples, two antigen binding moieties in the tri-specific antibody may be in a multi-chain antibody format as disclosed herein and the other antigen binding moiety may be in scFv or V_{H}/V_{L} format. For example, one antigen binding moiety (e.g., the anti-B7H3 moiety) may comprises a light chain that comprises a V_{L} domain and a light chain constant region, and a heavy chain that comprises a V_{H} and a heavy chain constant domain or a fragment thereof (which optionally may comprise the CH3 domain). Another antigen binding moiety (e.g., specific to one of the other antigen) may comprise a V_{H} fragment and a V_{L} fragment as separate chains (V_{H}/V_{L} format) or in scFv format. The third antigen binding moiety (e.g., specific to the other antigen of interest) may be in Fab format.

[0129] In some embodiments, the tri-specific antibody disclosed herein may comprise (i) a first antigen binding moiety in a multi-chain IgG like format (comprising a heavy chain that comprises a first V_{H} and a heavy chain constant region or a fragment thereof and a light chain that comprise a first V_{L} and a light chain constant region), (ii) a second antigen binding moiety that is in scFv form, and (iii) a third antigen binding moiety that is in Fab format. See, e.g., FIGS. 9A to 9D. In some examples, the first antigen binding moiety binds B7H3 and the second and third antigen binding moieties bind the two other antigens of interest (e.g., CD3 and one of CD137, GITR, OX40, and CD28). The three antigen binding moieties may be assembled to form the tri-specific antibody as disclosed herein in any suitable manner. Some non-limiting examples are provided in FIGS. 9A to 9D.

[0130] In some embodiments, the tri-specific antibody disclosed herein may comprise (i) a first antigen binding moiety in a multi-chain IgG like format (comprising a heavy chain that comprises a first V_{H} and a heavy chain constant region or a fragment thereof and a light chain that comprise a first V_{L} and a light chain constant region), (ii) a second antigen binding moiety that is in scFv format, and (iii) a third antigen binding moiety that is in scFv format. See, e.g., FIG. 10A to FIG. 10C. In some examples, the first antigen binding moiety binds B7H3 and the second and third antigen binding moieties bind the two other antigens of interest (e.g., C D3 and one of CD137, GITR, OX40, and CD28). The three antigen binding moieties may be assembled to form the tri-specific antibody as disclosed herein in any suitable manner. Some non-limiting examples are provided in FIGS. 10A-10C.

[0131] In some embodiments, the tri-specific antibody disclosed herein may comprise (i) a first antigen binding moiety in a multi-chain IgG like format (comprising a heavy chain that comprises a first V_{H} and a heavy chain constant region or a fragment thereof and a light chain that comprise a first V_{L} and a light chain constant region), (ii) a second antigen binding moiety that is in scFv format, and (iii) a third antigen binding moiety that is in V_{H}/V_{L} format. See, e.g., FIGS. 11A to 11C, and 11E, and FIG. 12A. In some examples, the first antigen binding moiety binds B7H3 and the second and third antigen binding moieties bind the two other antigens of interest (e.g., CD3 and one of CD137, GITR, OX40, and CD28). The three antigen binding moieties may be assembled to form the tri-specific antibody as disclosed herein in any suitable manner. Some non-limiting examples are provided in FIGS. 11A-11C and 11E, and FIG. 12A.

[0132] In some embodiments, the tri-specific antibody disclosed herein may comprise (i) a first antigen binding moiety in a multi-chain IgG like format (comprising a heavy chain that comprises a first V_{H} and a heavy chain constant region or a fragment thereof and a light chain that comprise a first V_{L} and a light chain constant region), (ii) a second antigen binding moiety that is in V_{H}/V_{L} format, and (iii) a third antigen binding moiety that is in V_{H}/V_{L} format. See, e.g., FIG. 11D. In some examples, the first antigen binding moiety binds B7H3 and the second and third antigen binding moieties bind the two other antigens of interest (e.g., CD3 and one of CD137, GITR, OX40, and CD28). The three antigen binding moieties may be assembled to form the tri-specific antibody as disclosed herein in any suitable manner. Some non-limiting examples are provided in FIG. 11D.

[0133] In some embodiments, the tri-specific antibody disclosed herein may comprise (i) a first antigen binding moiety in a multi-chain IgG like format (comprising a heavy chain that comprises a first V_{H} and a heavy chain constant region or a fragment thereof and a light chain that comprise a first V_{L} and a light chain constant region), (ii) a second antigen binding moiety that is in Fab format, and (iii) a third antigen binding moiety that is in Fab format. See, e.g., FIG. 12B. In some examples, the first antigen binding moiety binds B7H3 and the second and third antigen binding moieties bind the two other antigens of interest (e.g., CD3 and one of CD137, GITR, OX40, and CD28). The three antigen binding moieties may be assembled to form the tri-specific antibody as disclosed herein in any suitable manner. Some non-limiting examples are provided in FIG. 12B.

[0134] In some embodiments, the tri-specific antibody disclosed herein may comprise (i) a first antigen binding moiety in a multi-chain IgG like format (comprising a heavy chain that comprises a first V_{H} and a heavy chain constant region or a fragment thereof and a light chain that comprise a first V_{L} and a light chain constant region), (ii) a second antigen binding moiety that is in V_{H}/V_{L} format, and (iii) a third antigen binding moiety that is in Fab format. See, e.g., FIG. 12D. In some examples, the first antigen binding moiety binds B7H3 and the second and third antigen binding moieties bind the two other antigens of interest (e.g., CD3 and one of CD137, GITR, OX40, and CD28). The three antigen binding moieties may be assembled to form the tri-specific antibody as disclosed herein in any suitable manner. Some non-limiting examples are provided in FIG. 12D.

[0135] In some embodiments, the tri-specific antibody disclosed herein may comprise (i) a first antigen binding moiety in a multi-chain IgG like format (comprising a heavy chain that comprises a first V_{H} and a heavy chain constant region or a fragment thereof and a light chain that comprise a first V_{L} and a light chain constant region), (ii) a second antigen binding moiety that is in scFv format, and (iii) a third antigen binding moiety that is also in scFv format. See, e.g., FIGS. 13A-13C. In some examples, the scFv of the second antigen binding moiety is fused to a heavy chain of the first antigen binding moiety (e.g., to the C-terminus) and the scFv of the third antigen binding moiety is fused to a light chain of the first antigen binding moiety (e.g., to the C-terminus). FIG. 13A. Alternatively, the scFv of the third antigen binding moiety is fused to a heavy chain of the first antigen binding moiety (e.g., to the C-terminus) and the scFv of the second antigen binding moiety is fused to a light chain of the first antigen binding moiety (e.g., to the C-terminus). FIG. 13B. In another example, the scFv of the second antigen binding moiety is fused to one heavy chain of the first antigen binding moiety (e.g., to the C-terminus) and the scFv of the third antigen binding moiety is fused to the other heavy chain of the first antigen binding moiety (e.g., to the C-terminus). FIG. 13C.

(iii) Heterodimer Formation

[0136] In some embodiments, any of the multi-specific antibodies disclosed herein (e.g., bi-specific or tri-specific) are heterodimers formed by dimerization between two heavy chains. To facilitate heterodimeric assembly, mutations that enhance heterodimer formation may be introduced into the Fc regions of two heavy chains in a multi-specific antibodies. Examples include “knobs-into-holes” (Ridgway et al., Protein Engineering, 9 (7), pp. 617-21 (1996); Merchant et al., Nature Biotechnology, 16 (7), pp. 677-681 (1998)), electrostatics (Gunasekaran et al., Journal of Biological Chemistry, 285 (25), pp. 19637-19646 (2010)) or negative state designs (Kreudenstein et al., mAbs, 5 (5), pp. 646-654 (2013); Leaver-Fay et al., Structure, 24 (4), pp. 641-651 (2016)) (charged mutations). Other examples can be found in, e.g., Brinkmann et al., MABS (2017), 9(2):182-212, the relevant disclosures are incorporated by reference for the subject matter and purpose referenced herein.

[0137] In some examples, several strategies have been applied into designing orthogonal interfaces to facilitate cognate pairing, by swapping the domains of CH1 and CL, for example, CrossMab format (Schaefer et al., Proceedings of the National Academy of Sciences of the United States of America, 108 (27), pp. 11187-11192 (2011)), introducing alternatively disulphide bond (Mazor et al., mAbs, 7 (2), pp. 377-389 (2015)), mading further electrostatics in the CH1-CL region (Liu et al., Journal of Biological Chemistry, 290 (12), pp. 7535-7562 (2015)), and introducing mutations in both variable and constant domains (Lewis et al., Nature Biotechnology, 32 (2), pp. 191-198 (2014), Dillon et al., mAbs, 9 (2), pp. 213-230 (2017)). See also FIGS. 7A-7D, 9A-9D, 12B-12D, and 13C.

[0138] In some instances, mutations that reduce binding affinity to Protein A may be introduced into one or both of the heavy chain Fc regions in a multi-specific antibody to facilitate purification of the multi-specific antibodies. Such mutations are known in the art. See, e.g., Tustian et al., mAbs 8:828-838 (2016), the relevant disclosures of which are incorporated by reference for the purpose and subject matter referenced herein.

### (iv) Peptide Linkers

[0139] A peptide linker may be located between two fragments in a multi-specific antibody as disclosed herein, for example, between the V_{H} and V_{L} portions in a scFv fragment, between the scFv fragment and the heavy or light chain in a fusion chain, or between the heavy chain and light chain in a fusion polypeptide. Exemplary peptide linker includes the linker of (GGGGS)ₙ (SEQ ID NOs:665-670), in which n can be an integer between 1-6, for example, 1, 2, 3, 4, 5, or 6. Any of the peptide linkers described herein, e.g., the SGGGS (SEQ ID NO:671) linker or the (GGGGS)₄ (SEQ ID NO:668) linker, can comprise naturally occurring amino acids and/or non-naturally occurring amino acids. Naturally occurring amino acids include alanine (Ala), arginine (Arg), asparagine (Asn), aspartic acid (Asp), cysteine (Cys), glutamic acid (Glu), glutamine (Gin), glycine (Gly), histidine (His), isoleucine (He), leucine (Leu), lysine (Lys) methionine (Met), ornithine (Orn), phenylalanine (Phe), proline (Pro), serine (Ser), threonine (Thr), tryptophan (Trp), tyrosine (Tyr), and valine (Val). Non-naturally occurring amino acids can include protected amino acids such as naturally occurring amino acids protected with groups such as acetyl, formyl, tosyl, nitro and the like. Non-limiting examples of non-naturally occurring amino acids include azidohomoalanine, homopropargylglycine, homoallylglycine, p-bromophenylalanine, p-iodophenylalanine, azidophenylalanine, acetylphenylalanine or ethynylephenylalanine, amino acids containing an internal alkene such as trans-crotylalkene, serine allyl ether, allyl glycine, propargyl glycine, vinyl glycine, pyrrolysine, N-sigma-o-azidobenzyloxycarbonyl-L-Lysine (AzZLys), N-sigma-propargyloxycarbonyl-L-Lysine, N-sigma-2-azidoethoxycarbonyl-L-Lysine, N-sigma-tert-butyloxycarbonyl-L-Lysine (BocLys), N-sigma-allyloxycarbonyl-L-Lysine (AlocLys), N-sigma-acetyl-L-Lysine (AcLys), N-sigma-benzyloxycarbonyl-L-Lysine (ZLys), N-sigma-cyclopentyloxycarbonyl-L-Lysine (CycLys), N-sigma-D-prolyl-L-Lysine, N-sigma-nicotinoyl-L-Lysine (NicLys), N-sigma-N-Me-anthraniloyl-L-Lysine (NmaLys), N-sigma-biotinyl-L-Lysine, N-sigma-9-fluorenylmethoxycarbonyl-L-Lysine, N-sigma-methyl-L-Lysine, N-sigma-dimethyl-L-Lysine, N-sigma-multimethyl-L-Lysine, N-sigma-isopropyl-L-Lysine, N-sigma-dansyl-L-Lysine, N-sigma-o,p-dinitrophenyl-L-Lysine, N-sigma-p-toluenesulfonyl-L-Lysine, N-sigma-DL-2-amino-2carboxyethyl-L-Lysine, N-sigma-phenylpyruvamide-L-Lysine, N-sigma-pyruvamide-L-Lysine, azidohomoalanine, homopropargylglycine, homoallylglycine, p-bromophenylalanine, p-iodophenylalanine, azidophenylalanine, acetylphenylalanine or ethynylephenylalanine, amino acids containing and an internal alkene such as trans-crotylalkene, serine allyl ether, allyl glycine, propargyl glycine, and vinyl glycine.

### C. Exemplary Multi-Specific Antibodies

[0140] In some embodiments, the present disclosure provides bi-specific antibodies binding to B7H3 and one of CD40, CD137, GITR, OX40, CD47, CD3, and CD28. In addition, provided herein are tri-specific antibodies binding to B7H3 and two of the CD40, CD137, GITR, OX40, CD47, CD3, and CD28 antigens. Such bi-specific and tri-specific antibodies can comprise two or more antigen binding moieties derived from any of the parent antibodies provided herein (e.g., those listed in Table 1). Non-limiting examples are provided below.

### (i) Anti-B7H31CD40 Bi-Specific Antibodies

[0141] In some embodiments, the second antigen binding moiety in the bi-specific antibodies disclosed herein binds B7H3 and CD40, for example, human B7H3 and human CD40. Any antibody capable of binding to CD40 can be used in constructing the bi-specific antibodies disclosed herein. In some examples, the anti-CD40 portion of the bi-specific antibody described herein may be derived from the anti-CD40 antibodies provided herein (e.g., the anti-CD40 parent antibody provided in Table 1 above). The anti-CD40 antigen binding moiety may comprise the same heavy chain and/or light chain CDRs as a parent antibody. Alternatively, the antigen binding moiety may comprise substantially similar heavy chain and/or light chain CDRs as those of the parent antibody (e.g., comprising no more than 5, 4, 3, 2, or 1 amino acid residue variations as compared with the parent antibody). In some instances, the anti-CD40 antigen binding moiety in the bi-specific antibody may have the same heavy chain variable region and/or the same light chain variable region as the parent antibody. For example, the antigen binding moiety in the bi-specific antibody may have the same heavy chain and/or the same light chain as the parent antibody.

[0142] In some examples, the anti-B7H3/CD40 bi-specific antibodies may comprise an anti-CD40 moiety in scFv format and an anti-B7H3 moiety in multi-chain format. The anti-CD40 scFv fragment may be derived from any of the anti-CD40 antibodies disclosed herein, for example, the anti-CD40 parent antibody provided in Table 1 above the anti-CD40 parent antibody provided in Table 1 above. For example, the bi-specific antibody may comprise a first chain comprising the scFv fragment fused with the heavy chain of the anti-B7H3 antibody such as that of B7H3 Ab1 or B7H3 Ab2 shown in Table 1 above, and a second chain that is the light chain of the anti-B7H3 antibody. Alternatively, the bi-specific antibody may comprise a first chain comprising the scFv fragment may be fused with the light chain of the anti-B7H3 antibody such as that of B7H3 Ab1 or B7H3 Ab2 shown in Table 1 above, and a second chain that is the heavy chain of the anti-B7H3 antibody. In some instances, the heavy chain of the anti-B7H3 antibody may comprise a mutated Fc region having altered binding affinity and/or binding specificity to an Fc receptor such as those described herein.

[0143] In some embodiments, the anti-B7H3/CD40 bi-specific antibody disclosed herein may be in a three-chain format as disclosed herein. Such a bi-specific antibody may comprise a first polypeptide comprises the heavy chain of the first antigen binding moiety (e.g., binding to B7H3) fused to the light chain of second antigen binding moiety (e.g., binding to CD40), a second polypeptide comprising the light chain of the first antigen binding moiety, and a third polypeptide comprising the heavy chain of the second antigen binding moiety. In some instances, the heavy chain of the second antigen binding moiety may comprise a V_{H} fragment and a heavy chain constant region such as CH1. Alternatively, the bi-specific antibody may comprise a first polypeptide comprising the heavy chain of the second antigen binding moiety (e.g., binding to CD40) fused to the light chain of the first antigen binding moiety (e.g., binding to B7H3), a second polypeptide comprising the light chain of the second antigen binding moiety, and a third polypeptide comprising the heavy chain of the first antigen binding moiety. In some instances, the heavy chain of the first antigen binding moiety may comprise a V_{H} fragment and a heavy chain constant region such as CH1. In some instances, the light chain fragment in the first polypeptide can be located at the N-terminus. Alternatively, it can be located at the C-terminus.

[0144] In some examples, the bi-specific antibody may comprise two chains: (i) a first polypeptide comprising the V_{H} fragment of the first antigen binding moiety and the heavy chain of the second antigen binding moiety, and (ii) a second chain comprising the V_{L} fragment of the first antigen binding moiety and the light chain of the second antigen binding moiety. In some instances, the first antigen binding moiety binds B7H3 and the second antigen binding moiety binds CD40. In other instances, the first antigen binding moiety binds CD40 and the second antigen binding moiety binds B7H3

[0145] In other examples, the bi-specific antibody may comprise two chains: (i) a first polypeptide comprising the V_{L} fragment of a first antigen binding moiety and a heavy chain comprising the V_{H} fragment of a second antigen binding moiety and an Fc fragment (e.g., a whole Fc fragment or a portion thereof such as CH2-CH3); and (ii) a second polypeptide comprising the V_{H} fragment of the first antigen binding moiety and the V_{L} fragment of the second antigen binding moiety. In some instances, the first antigen binding moiety binds B7H3 and the second antigen binding moiety binds CD40. In other instances, the first antigen binding moiety binds CD40 and the second antigen binding moiety binds B7H3.

[0146] In some embodiments, any of the bi-specific antibodies disclosed herein may be in an IgG-like format (comprising 4-chains): one arm binding to human B7H3 and another arm binding to CD40. Structurally it is made from half of anti-B7H3 antibody and half of anti-CD40 antibody, with the similar size and shape as natural IgG.

[0147] In some aspect, the present disclosure provides a polypeptide complex comprising a first polypeptide comprising, from N-terminus to C-terminus, a first heavy chain variable domain (V_{H}) of a first antibody operably linked to a first T cell receptor (TCR) constant region (C1), and a second polypeptide comprising, from N-terminus to C-terminus, a first light chain variable domain (V_{L}) of the first antibody operably linked to a second TCR constant region (C2), wherein C1 and C2 are capable of forming a dimer comprising at least one non-native interchain bond between C1 and C2, and the non-native interchain bond is capable of stabilizing the dimer, and the first antibody has a first antigenic specificity.

[0148] In some aspect, the present disclosure provides a bispecific polypeptide complex, comprising a first antigen-binding moiety associated with a second antigen-binding moiety, wherein the first antigen-binding moiety comprising a first polypeptide comprising, from N-terminal to C-terminal, a first heavy chain variable domain (V_{H}) of a first antibody operably linked to a first T cell receptor (TCR) constant region (C1), and a second polypeptide comprising, from N-terminal to C-terminal, a first light chain variable domain (V_{L}) of the first antibody operably linked to a second TCR constant region (C2), wherein C1 and C2 are capable of forming a dimer comprising at least one non-native interchain bond between a first mutated residue comprised in C1 and a second mutated residue comprised in C2, and the non-native interchain bond is capable of stabilizing the dimer, and the first antibody has a first antigenic specificity, a second antigen-binding moiety has a second antigenic specificity which is different from the first antigenic specificity, and the first antigen-binding moiety and the second antigen-binding moiety are less prone to mispair than otherwise would have been if both the first and the second antigen-binding moieties are counterparts of natural Fab.

[0149] In some examples, any of the anti-B7H3/CD40 bispecific antibodies may comprise mutations for enhancing heterodimerization and/or reducing protein A binding such as those disclosed herein. Alternatively or in addition, the anti-B7H3/CD40 bispecific antibodies may be in CrossMab format.

[0150] Exemplary anti-B7H3/CD40 bi-specific antibodies are provided in Example 3 and Table 3, which are within the scope of the present disclosure.

### (ii) Anti-B7H31CD137, Anti-B7H3/GITR, and Anti-B7H31OX40 Bi-Specific Antibodies

[0151] In some embodiments, the bi-specific antibodies disclosed herein binds B7H3 and a second antigen, which is CD137, GITR or OX40, (e.g., human B7H3, human CD137, GITR or OX40. Any antibody capable of binding to B7H3, CD137, GITR or OX40 can be used in constructing the bi-specific antibodies disclosed herein, e.g., the parent antibodies listed in Table 1 above. In some examples, the anti-CD137, ant-GITR or anti-OX40 portion of the bi-specific antibody described herein may be derived from any of the anti-CD137, anti-GITR or anti-OX40 antibodies provided herein (e.g., the corresponding parent antibodies listed in Table 1 above). The anti-CD137, anti-GITR or anti-OX40 antigen binding moiety may comprise the same heavy chain and/or light chain CDRs as a parent antibody. Alternatively, the antigen binding moiety may comprise substantially similar heavy chain and/or light chain CDRs as those of the parent antibody (e.g., comprising no more than 5, 4, 3, 2, or 1 amino acid residue variations as compared with the parent antibody). In some instances, the anti-CD137, anti-GITR or anti-OX40 antigen binding moiety in the bi-specific antibody may have the same heavy chain variable region and/or the same light chain variable region as the parent antibody. For example, the antigen binding moiety in the bi-specific antibody may have the same heavy chain and/or the same light chain as the parent antibody.

[0152] In some examples, the anti-B7H3/CD137, anti-B7H3/GITR or anti-B7H3/OX40 bi-specific antibodies may comprise an anti-CD137, anti-GITR or anti-OX40 moiety in scFv format and an anti-B7H3 moiety in multi-chain format. The anti-CD137, anti-GITR or anti-OX40 scFv fragment may be derived from any of the anti-CD137, anti-GITR or anti-OX40 antibodies disclosed herein, for example, the corresponding parent antibodies listed in Table 1 above.

[0153] For example, the bi-specific antibody may comprise a first chain comprising the scFv fragment fused with the heavy chain of the anti-B7H3 antibody such as that of B7H3 Ab1 or B7H3 Ab2, and a second chain that is the light chain of the anti-B7H3 antibody. Alternatively, the bi-specific antibody may comprise a first chain comprising the scFv fragment may be fused with the light chain of the anti-B7H3 antibody such as that of B7H3 Ab1 or B7H3 Ab2, and a second chain that is the heavy chain of the anti-B7H3 antibody. In some instances, the heavy chain of the anti-B7H3 antibody may comprise a mutated Fc region having altered binding affinity and/or binding specificity to an Fc receptor such as those described herein.

[0154] In some embodiments, the anti-B7H3/CD137, anti-B7H3/GITR or anti-B7H3/OX40 bi-specific antibody disclosed herein may be in a three-chain format as disclosed herein. Such a bi-specific antibody may comprise a first polypeptide comprises the heavy chain of the first antigen binding moiety (e.g., binding to B7H3) fused to the light chain of second antigen binding moiety (e.g., binding to CD137, GITR or OX40), a second polypeptide comprising the light chain of the first antigen binding moiety, and a third polypeptide comprising the heavy chain of the second antigen binding moiety. In some instances, the heavy chain of the second antigen binding moiety may comprise a V_{H} fragment and a heavy chain constant region such as CH1. Alternatively, the bi-specific antibody may comprise a first polypeptide comprising the heavy chain of the second antigen binding moiety (e.g., binding to CD137, GITR or OX40) fused to the light chain of the first antigen binding moiety (e.g., binding to B7H3), a second polypeptide comprising the light chain of the second antigen binding moiety, and a third polypeptide comprising the heavy chain of the first antigen binding moiety. In some instances, the heavy chain of the first antigen binding moiety may comprise a V_{H} fragment and a heavy chain constant region such as CH1. In some instances, the light chain fragment in the first polypeptide can be located at the N-terminus. Alternatively, it can be located at the C-terminus.

[0155] In some examples, the bi-specific antibody may comprise two chains: (i) a first polypeptide comprising the V_{H} fragment of the first antigen binding moiety and the heavy chain of the second antigen binding moiety, and (ii) a second chain comprising the V_{L} fragment of the first antigen binding moiety and the light chain of the second antigen binding moiety. In some instances, the first antigen binding moiety binds B7H3 and the second antigen binding moiety binds CD137, GITR or OX40. In other instances, the first antigen binding moiety binds CD137, GITR or OX40 and the second antigen binding moiety binds B7H3

[0156] In other examples, the bi-specific antibody may comprise two chains: (i) a first polypeptide comprising the V_{L} fragment of a first antigen binding moiety and a heavy chain comprising the V_{H} fragment of a second antigen binding moiety and an Fc fragment (e.g., a whole Fc fragment or a portion thereof such as CH2-CH3); and (ii) a second polypeptide comprising the V_{H} fragment of the first antigen binding moiety and the V_{L} fragment of the second antigen binding moiety. In some instances, the first antigen binding moiety binds B7H3 and the second antigen binding moiety binds CD137, GITR or OX40. In other instances, the first antigen binding moiety binds CD137, GITR or OX40 and the second antigen binding moiety binds B7H3.

[0157] In some embodiments, any of the bi-specific antibodies disclosed herein may be in an IgG-like format (4-chain format): one arm binding to human B7H3 and another arm binding to CD137, GITR or OX40. Structurally it is made from half of anti-B7H3 antibody and half of anti-CD137, anti-GITR or anti-OX40 antibody, with the similar size and shape as natural IgG.

[0158] In some aspect, the present disclosure provides a polypeptide complex comprising a first polypeptide comprising, from N-terminus to C-terminus, a first heavy chain variable domain (V_{H}) of a first antibody operably linked to a first T cell receptor (TCR) constant region (C1), and a second polypeptide comprising, from N-terminus to C-terminus, a first light chain variable domain (V_{L}) of the first antibody operably linked to a second TCR constant region (C2), wherein C1 and C2 are capable of forming a dimer comprising at least one non-native interchain bond between C1 and C2, and the non-native interchain bond is capable of stabilizing the dimer, and the first antibody has a first antigenic specificity.

[0159] In some aspect, the present disclosure provides a bispecific polypeptide complex, comprising a first antigen-binding moiety associated with a second antigen-binding moiety, wherein the first antigen-binding moiety comprising a first polypeptide comprising, from N-terminal to C-terminal, a first heavy chain variable domain (V_{H}) of a first antibody operably linked to a first T cell receptor (TCR) constant region (C1), and a second polypeptide comprising, from N-terminal to C-terminal, a first light chain variable domain (V_{L}) of the first antibody operably linked to a second TCR constant region (C2), wherein C1 and C2 are capable of forming a dimer comprising at least one non-native interchain bond between a first mutated residue comprised in C1 and a second mutated residue comprised in C2, and the non-native interchain bond is capable of stabilizing the dimer, and the first antibody has a first antigenic specificity, a second antigen-binding moiety has a second antigenic specificity which is different from the first antigenic specificity, and the first antigen-binding moiety and the second antigen-binding moiety are less prone to mispair than otherwise would have been if both the first and the second antigen-binding moieties are counterparts of natural Fab.

[0160] In some examples, any of the anti-B7H3/CD40 bispecific antibodies may comprise mutations for enhancing heterodimerization and/or reducing protein A binding such as those disclosed herein. Alternatively or in addition, the anti-B7H3/CD40 bispecific antibodies may be in CrossMab format as also disclosed herein.

[0161] Exemplary anti-B7H3/CD137, anti-B7H3/GITR or anti-B7H3/OX40 bi-specific antibodies are provided in Example 4-6 and Table 4-6 below, which are within the scope of the present disclosure.

(iii) Anti-B7H31CD47 Bi-Specific Antibodies

[0162] In some embodiments, the bi-specific antibodies disclosed herein binds B7H3 and CD47, for example, human B7H3 and human CD47. Any antibody capable of binding to B7H3 and CD47 can be used in constructing the bi-specific antibodies disclosed herein. In some examples, the anti-CD47 portion of the bi-specific antibody described herein may be derived from any of the anti-CD47 antibodies provided herein (e.g., the corresponding parent antibodies listed in Table 1 above). The anti-CD47 antigen binding moiety may comprise the same heavy chain and/or light chain CDRs as the parent antibody. Alternatively, the antigen binding moiety may comprise substantially similar heavy chain and/or light chain CDRs as those of the parent antibody (e.g., comprising no more than 5, 4, 3, 2, or 1 amino acid residue variations as compared with the parent antibody). In some instances, the anti-CD47 antigen binding moiety in the bi-specific antibody may have the same heavy chain variable region and/or the same light chain variable region as the parent antibody. For example, the antigen binding moiety in the bi-specific antibody may have the same heavy chain and/or the same light chain as the parent antibody.

[0163] In some examples, the anti-B7H3/CD47 bi-specific antibodies may comprise an anti-CD47 moiety in scFv format and an anti-B7H3 moiety in multi-chain format. The anti-CD47 scFv fragment may be derived from any of the anti-CD47 antibodies disclosed herein, for example, the corresponding parent antibodies listed in Table 1 above.

[0164] For example, the bi-specific antibody may comprise a first chain comprising the scFv fragment fused with the heavy chain of the anti-B7H3 antibody such as that of Ly1562, and a second chain that is the light chain of the anti-B7H3 antibody. Alternatively, the bi-specific antibody may comprise a first chain comprising the scFv fragment may be fused with the light chain of the anti-B7H3 antibody such as that of B7H3 Ab1 or B7H3 Ab2, and a second chain that is the heavy chain of the anti-B7H3 antibody. In some instances, the heavy chain of the anti-B7H3 antibody may comprise a mutated Fc region having altered binding affinity and/or binding specificity to an Fc receptor such as those described herein.

[0165] In some embodiments, the anti-B7H3/CD47 bi-specific antibody disclosed herein may be in a three-chain format as disclosed herein. Such a bi-specific antibody may comprise a first polypeptide comprises the heavy chain of the first antigen binding moiety (e.g., binding to B7H3) fused to the light chain of second antigen binding moiety (e.g., binding to CD47), a second polypeptide comprising the light chain of the first antigen binding moiety, and a third polypeptide comprising the heavy chain of the second antigen binding moiety. In some instances, the heavy chain of the second antigen binding moiety may comprise a V_{H} fragment and a heavy chain constant region such as CH1. Alternatively, the bi-specific antibody may comprise a first polypeptide comprising the heavy chain of the second antigen binding moiety (e.g., binding to CD47) fused to the light chain of the first antigen binding moiety (e.g., binding to B7H3), a second polypeptide comprising the light chain of the second antigen binding moiety, and a third polypeptide comprising the heavy chain of the first antigen binding moiety. In some instances, the heavy chain of the first antigen binding moiety may comprise a V_{H} fragment and a heavy chain constant region such as CH1. In some instances, the light chain fragment in the first polypeptide can be located at the N-terminus. Alternatively, it can be located at the C-terminus.

[0166] In some examples, the bi-specific antibody may comprise two chains: (i) a first polypeptide comprising the V_{H} fragment of the first antigen binding moiety and the heavy chain of the second antigen binding moiety, and (ii) a second chain comprising the V_{L} fragment of the first antigen binding moiety and the light chain of the second antigen binding moiety. In some instances, the first antigen binding moiety binds B7H3 and the second antigen binding moiety binds CD47. In other instances, the first antigen binding moiety binds CD47 and the second antigen binding moiety binds B7H3

[0167] In other examples, the bi-specific antibody may comprise two chains: (i) a first polypeptide comprising the V_{L} fragment of a first antigen binding moiety and a heavy chain comprising the V_{H} fragment of a second antigen binding moiety and an Fc fragment (e.g., a whole Fc fragment or a portion thereof such as CH2-CH3); and (ii) a second polypeptide comprising the V_{H} fragment of the first antigen binding moiety and the V_{L} fragment of the second antigen binding moiety. In some instances, the first antigen binding moiety binds B7H3 and the second antigen binding moiety binds CD47. In other instances, the first antigen binding moiety binds CD47 and the second antigen binding moiety binds B7H3.

[0168] In some embodiments, any of the bi-specific antibodies disclosed herein may be in an IgG-like format: one arm binding to human B7H3 and another arm binding to CD47. Structurally it is made from half of anti-B7H3 antibody and half of anti-CD47 antibody, with the similar size and shape as natural IgG.

[0169] In some aspect, the present disclosure provides a polypeptide complex comprising a first polypeptide comprising, from N-terminus to C-terminus, a first heavy chain variable domain (V_{H}) of a first antibody operably linked to a first T cell receptor (TCR) constant region (C1), and a second polypeptide comprising, from N-terminus to C-terminus, a first light chain variable domain (V_{L}) of the first antibody operably linked to a second TCR constant region (C2), wherein C1 and C2 are capable of forming a dimer comprising at least one non-native interchain bond between C1 and C2, and the non-native interchain bond is capable of stabilizing the dimer, and the first antibody has a first antigenic specificity.

[0170] In some aspect, the present disclosure provides a bispecific polypeptide complex, comprising a first antigen-binding moiety associated with a second antigen-binding moiety, wherein the first antigen-binding moiety comprising a first polypeptide comprising, from N-terminal to C-terminal, a first heavy chain variable domain (V_{H}) of a first antibody operably linked to a first T cell receptor (TCR) constant region (C1), and a second polypeptide comprising, from N-terminal to C-terminal, a first light chain variable domain (V_{L}) of the first antibody operably linked to a second TCR constant region (C2), wherein C1 and C2 are capable of forming a dimer comprising at least one non-native interchain bond between a first mutated residue comprised in C1 and a second mutated residue comprised in C2, and the non-native interchain bond is capable of stabilizing the dimer, and the first antibody has a first antigenic specificity, a second antigen-binding moiety has a second antigenic specificity which is different from the first antigenic specificity, and the first antigen-binding moiety and the second antigen-binding moiety are less prone to mispair than otherwise would have been if both the first and the second antigen-binding moieties are counterparts of natural Fab.

[0171] In some examples, any of the anti-B7H3/CD47 bispecific antibodies may comprise mutations for enhancing heterodimerization and/or reducing protein A binding such as those disclosed herein. Alternatively or in addition, the anti-B7H3/CD47 bispecific antibodies may be in CrossMab format as also disclosed herein.

[0172] Exemplary anti-B7H3/CD47 bi-specific antibodies are provided in Example 5 and Table 5 below, which are within the scope of the present disclosure.

### (iv) Anti-B7H31CD3 Bi-Specific Antibodies

[0173] In some embodiments, the bi-specific antibodies disclosed herein binds B7H4 and CD3, for example, human B7H4 and human CD3. Any antibody capable of binding to CD3 can be used in constructing the bi-specific antibodies disclosed herein. In some examples, the anti-CD3 portion of the bi-specific antibody described herein may be derived from any of the anti-CD3 antibodies provided herein (e.g., the corresponding parent antibodies listed in Table 1 above). The anti-CD3 antigen binding moiety may comprise the same heavy chain and/or light chain CDRs as a parent antibody. Alternatively, the antigen binding moiety may comprise substantially similar heavy chain and/or light chain CDRs as those of the parent antibody (e.g., comprising no more than 5, 4, 3, 2, or 1 amino acid residue variations as compared with the parent antibody). In some instances, the anti-CD3 antigen binding moiety in the bi-specific antibody may have the same heavy chain variable region and/or the same light chain variable region as the parent antibody. For example, the antigen binding moiety in the bi-specific antibody may have the same heavy chain and/or the same light chain as the parent antibody.

[0174] In some examples, the anti-B7H3/CD3 bi-specific antibodies may comprise an anti-CD3 moiety in V_{H} and V_{L} fragment format and an anti-B7H3 moiety in multi-chain format. The anti-CD3 V_{H} and V_{L} fragment may be derived from any of the anti-CD3 antibodies disclosed herein, for example, each of the corresponding parent antibodies listed in Table 1 above.

[0175] For example, the bi-specific antibody may comprise a first chain comprising the Fab fragment of anti-B7H3 HC and anti-CD3 V_{H} and CH1 of anti-CD3 LC and an Fc fragment (e.g., a whole Fc fragment or a portion thereof such as CH2-CH3), a second chain that is the light chain of the anti-B7H3 antibody, a third chain that is the anti-CD3 V_{L} fused with CH1 of anti-CD3 HC, and a fourth chain that is the heavy chain of anti-B7H3 antibody. Two Fc fragments with engineered CH3 domain to create a “knob” in one and a “hole” in the other to promote heterodimerization.

[0176] In some examples, any of the anti-B7H3/CD3 bispecific antibodies may comprise mutations for enhancing heterodimerization and/or reducing protein A binding such as those disclosed herein. Alternatively or in addition, the anti-B7H3/CD3 bispecific antibodies may be in CrossMab format also disclosed herein

[0177] Exemplary anti-B7H3/CD3 bi-specific antibodies are provided in Example 8 and Table 8, which are within the scope of the present disclosure.

### (v) Anti-B7H3/CD31CD137 Tri-Specific Antibodies

[0178] In some embodiments, the tri-specific antibodies disclosed herein binds B7H3, CD3 and CD137, for example, human B7H3, human CD3 and CD137. Any antibody capable of binding to B7H3, CD3 and CD137 can be used in constructing the tri-specific antibodies disclosed herein. In some examples, the anti-B7H3 portion, the anti-CD3 and anti-CD137 portion of the tri-specific antibody described herein may be derived from any of the anti-B7H3, anti-CD3 and anti-CD137 parent antibodies provided in Table 1 above. The anti-B7H3, anti-CD3 and anti-CD137 antigen binding moieties may comprise the same heavy chain and/or light chain CDRs as a parent antibody. Alternatively, one or more of the antigen binding moieties may comprise substantially similar heavy chain and/or light chain CDRs as those of the parent antibody (e.g., comprising no more than 5, 4, 3, 2, or 1 amino acid residue variations as compared with the parent antibody). In some instances, the anti-B7H3, anti-CD3 and anti-CD137antigen binding moiety in the tri-specific antibody may have the same heavy chain variable region and/or the same light chain variable region as the parent antibody. For example, one or more of the antigen binding moieties in the tri-specific antibody may have the same heavy chain and/or the same light chain as the parent antibody.

[0179] In some examples, the anti-B7H3/CD3/CD137 tri-specific antibodies may be a multi-chain complex comprising an anti-CD137 moiety in scFv format and an anti-B7H3 moiety and anti-CD3 in V_{H}/V_{L} and/or Fab format. For example, the tri-specific antibody may comprise a first chain comprising the anti-CD137 scFv fragment fused with the heavy chain of the anti-B7H3 antibody such as that of B7H3 Ab1 or B7H3 Ab2, and a second chain comprising the Fab fragment of anti-B7H3 HC and anti-CD3 V_{H} and CH1 fragment of anti-CD3 LC and an Fc fragment (e.g., a whole Fc fragment or a portion thereof such as CH2-CH3) and anti-CD137 scFv fragment; and a third chain that is the light chain of the anti-B7H3 antibody; and a fourth chain that is anti-CD3 V_{L} with CH1 fragment of anti-CD3 HC. Two Fc fragments with engineered CH3 domain to create a “knob” in one and a “hole” in the other to promote heterodimerization.

[0180] In some examples, the anti-B7H3/CD3/CD137 tri-specific antibodies may comprise an anti-CD3 moiety in fused V_{H} and V_{L} (scFv) format and an anti-B7H3 moiety in multi-chain format. For example, the tri-specific antibody may comprise a first chain comprising anti-CD137 scFv fragment fused with the heavy chain of the anti-B7H3 antibody such as that of B7H3 Ab1 or B7H3 Ab2; a second chain comprising the Fab fragment of anti-B7H3 HC and anti-CD3 scFv fragment and an Fc fragment (e.g., a whole Fc fragment or a portion thereof such as CH2-CH3); a third chain that is the light chain of the anti-B7H3 antibody. Two Fc fragments with engineered CH3 domain to create a “knob” in one and a “hole” in the other to promote heterodimerization.

[0181] In some examples, the anti-B7H3/CD3/CD137 tri-specific antibodies may comprise an anti-CD3 moiety in fused V_{H} and V_{L} fragment format and an anti-B7H3 moiety in multi-chain format. The anti-CD3 fused V_{H} and V_{L} fragment may be derived from any of the anti-CD3 antibodies disclosed herein, for example, any of those provided in Table 1 above. For example, the tri-specific antibody may comprise a first chain comprising the V_{H} fragment of anti-B7H3 moiety and anti-CD3 V_{H} fragment and an Fc fragment (e.g., a whole Fc fragment or a portion thereof such as CH2-CH3) and anti-CD137 scFv fragment; a second chain comprising the V_{H} fragment of anti-B7H3 moiety and anti-CD3 V_{L} fragment and an Fc fragment (e.g., a whole Fc fragment or a portion thereof such as CH2-CH3); and a third chain that is the light chain of anti-B7H3 antibody. Two Fc fragments with engineered CH3 domain to create a “knob” in one and a “hole” in the other to promote heterodimerization.

[0182] In some examples, the anti-B7H3/CD3/CD137 tri-specific antibodies may comprise an anti-CD3 moiety in fused V_{H} and V_{L} fragment format (scFv) and an anti-B7H3 moiety in multi-chain format. For example, the tri-specific antibody may comprise a first chain comprising the V_{H} fragment of anti-B7H3 moiety and anti-CD3 V_{H} fragment and an Fc fragment (e.g., a whole Fc fragment or a portion thereof such as CH2-CH3); a second chain comprising the V_{H} fragment of anti-B7H3 moiety and anti-CD3 V_{L} fragment and an Fc fragment (e.g., a whole Fc fragment or a portion thereof such as CH2-CH3); and a third chain comprising the light chain of anti-B7H3 antibody and anti-CD137 scFv fragment. Two Fc fragments with engineered CH3 domain to create a “knob” in one and a “hole” in the other to promote heterodimerization.

[0183] In some examples, any of the anti-B7H3/CD3/CD137 trispecific antibodies may comprise mutations for enhancing heterodimerization and/or reducing protein A binding such as those disclosed herein. Alternatively or in addition, any of the antigen binding moieties in the anti-B7H3/CD3/CD137 trispecific antibodies may be in CrossMab format.

[0184] Exemplary anti-B7H3/CD3/CD137 tri-specific antibodies are provided in Example 9 and Table 9 below, which are within the scope of the present disclosure.

### (vi) Anti-B7H31CD31CD28 Tri-Specific Antibodies

[0185] In some embodiments, the tri-specific antibodies disclosed herein binds B7H3, CD3 and CD28, for example, human B7H3, human CD3 and human CD28. Any antibody capable of binding to B7H3, CD3 and CD28 can be used in constructing the tri-specific antibodies disclosed herein. In some examples, the anti-B7H3, anti-CD3 and anti-CD28 portions of the tri-specific antibody described herein may be derived from any of the corresponding parent anti-B7H3, anti-CD3 and anti-CD28 antibodies provided in Table 1 above. For example, one or more of the anti-B7H3, anti-CD3 and anti-CD28 antigen binding moieties may comprise the same heavy chain and/or light chain CDRs as a parent antibody, e.g., those listed in Table 1 above. Alternatively, the one or more antigen binding moieties may comprise substantially similar heavy chain and/or light chain CDRs as those of the corresponding parent antibody (e.g., comprising no more than 5, 4, 3, 2, or 1 amino acid residue variations as compared with the parent antibody). In some instances, one or more of the anti-B7H3, the anti-CD3 and anti-CD28 antigen binding moieties in the tri-specific antibody may have the same heavy chain variable region and/or the same light chain variable region as the corresponding parent antibodies. For example, the antigen binding moieties in the tri-specific antibody may have the same heavy chain and/or the same light chain as the corresponding parent antibodies.

[0186] In some examples, the anti-B7H3/CD3/CD28 tri-specific antibodies may comprise an anti-B7H3 binding moiety in multi-chain format (IgG like), an anti-CD3 binding moiety in Fab format, and an anti-CD28 binding moiety in scFv format. In some instances, the anti-CD28 scFv may be fused to the heavy chains of the anti-B7H3 binding moiety (either one or both). Alternatively or in addition, one chain of the anti-CD3 Fab may be fused with one heavy chain of the anti-B7H3 binding moiety (e.g., located in the constant region, for example, between CH1 and CH2 regions). Two Fc fragments with engineered CH3 domain to create a “knob” in one and a “hole” in the other to promote heterodimerization.

[0187] In some examples, the anti-B7H3/CD3/CD28 tri-specific antibodies may comprise an anti-B7H3 binding moiety in multi-chain format (IgG like), an anti-CD3 binding moiety in scFv format, and an anti-CD28 binding moiety also in scFv format. In some instances, the anti-CD28 scFv may be fused to the heavy chains of the anti-B7H3 binding moiety (either one or both). Alternatively or in addition, the anti-CD3 scFv o may be fused with one heavy chain of the anti-B7H3 binding moiety (e.g., located in the constant region, for example, between CH1 and CH2 regions). Two Fc fragments with engineered CH3 domain to create a “knob” in one and a “hole” in the other to promote heterodimerization.

[0188] In some examples, the anti-B7H3/CD3/CD28 tri-specific antibodies may comprise an anti-B7H3 binding moiety in multi-chain format (IgG like), an anti-CD3 binding moiety in V_{H}/V_{L} format, and an anti-CD28 binding moiety in scFv format. In some instances, the anti-CD28 scFv may be fused to the heavy chains of the anti-B7H3 binding moiety (either one or both). In other instances, the anti-CD28 scFv may be fused to the light chains of the anti-B7H3 binding moiety (either one or both). Alternatively or in addition, each of the V_{H} and V_{L} of the anti-CD3 moiety may be fused with one of the heavy chains of the anti-B7H3 binding moiety (e.g., located in the constant region, for example, between CH1 and CH2 regions). Two Fc fragments with engineered CH3 domain to create a “knob” in one and a “hole” in the other to promote heterodimerization.

[0189] In some examples, the anti-B7H3/CD3/CD28 tri-specific antibodies may comprise an anti-B7H3 binding moiety in multi-chain format (IgG like), an anti-CD3 binding moiety in V_{H}/V_{L} format, and an anti-CD28 binding moiety also in V_{H}/V_{L} format. In some instances, each of the V_{H} and V_{L} of the anti-CD28 binding moiety may be fused to one of the heavy chains of the anti-B7H3 binding moiety (e.g., located at the C-terminus). Alternatively or in addition, each of the V_{H} and V_{L} of the anti-CD3 moiety may also be fused with one of the heavy chains of the anti-B7H3 binding moiety (e.g., located in the constant region, for example, between CH1 and CH2 regions). Two Fc fragments with engineered CH3 domain to create a “knob” in one and a “hole” in the other to promote heterodimerization.

[0190] In some examples, any of the anti-B7H3/CD3/CD28 trispecific antibodies may comprise mutations for enhancing heterodimerization and/or reducing protein A binding such as those disclosed herein. Alternatively or in addition, the anti-B7H3/CD3/CD28 trispecific antibodies may be in CrossMab format.

[0191] Exemplary anti-B7H3/CD3/CD28 tri-specific antibodies are provided in Example 10 and Table 10, which are within the scope of the present disclosure.

(vii) Anti-B7H31CD31OX40 Tri-Specific Antibodies

[0192] In some embodiments, the tri-specific antibodies disclosed herein binds B7H3, CD3 and OX40, for example, human B7H3, human CD3 and human OX40. Any antibody capable of binding to B7H3, CD3 and OX40 can be used in constructing the tri-specific antibodies disclosed herein. In some examples, the anti-B7H3, anti-CD3 and anti-OX40 portions of the tri-specific antibody described herein may be derived from any of the corresponding parent anti-B7H3, anti-CD3 and anti-OX40 antibodies provided in Table 1 above. For example, one or more of the anti-B7H3, anti-CD3 and anti-OX40 antigen binding moieties may comprise the same heavy chain and/or light chain CDRs as a parent antibody, e.g., those listed in Table 1 above. Alternatively, the one or more antigen binding moieties may comprise substantially similar heavy chain and/or light chain CDRs as those of the corresponding parent antibody (e.g., comprising no more than 5, 4, 3, 2, or 1 amino acid residue variations as compared with the parent antibody). In some instances, one or more of the anti-B7H3, the anti-CD3 and anti-OX40 antigen binding moieties in the tri-specific antibody may have the same heavy chain variable region and/or the same light chain variable region as the corresponding parent antibodies. For example, the antigen binding moieties in the tri-specific antibody may have the same heavy chain and/or the same light chain as the corresponding parent antibodies.

[0193] In some examples, the anti-B7H3/CD3/OX40 tri-specific antibodies may be a multi-chain molecule comprising an anti-OX40 moiety in scFv format and an anti-B7H3 moiety and anti-CD3 in V_{H}/V_{L} and/or Fab fragment format. For example, the tri-specific antibody may comprise a first chain comprising the anti-OX40 scFv fragment fused with the heavy chain of the parent anti-B7H3 antibody such as B7H3 Ab1 or B7H3 Ab2, and a second chain comprising the Fab fragment of anti-B7H3 HC and anti-CD3 V_{H} and CH1 fragment of anti-CD3 LC and an Fc fragment (e.g., a whole Fc fragment or a portion thereof such as CH2-CH3) and anti-OX40 scFv fragment; and a third chain that is the light chain of the anti-B7H3 antibody; and a fourth chain that is anti-CD3 V_{L} with CH1 fragment of anti-CD3 HC. Two Fc fragments with engineered CH3 domain to create a “knob” in one and a “hole” in the other to promote heterodimerization.

[0194] In another example, the tri-specific antibody may comprise a first chain comprising the anti-OX40 scFv fragment fused with the heavy chain of the parent anti-B7H3 antibody such as B7H3 Ab1 or B7H3 Ab2, and a second chain comprising the Fab fragment of anti-B7H3 HC and anti-CD3 V_{H} and CH1 fragment of anti-CD3 LC and an Fc fragment (e.g., a whole Fc fragment or a portion thereof such as CH2-CH3); and a third chain that is the light chain of the anti-B7H3 antibody; and a fourth chain that is anti-CD3 V_{L} with CH1 fragment of anti-CD3 HC. Two Fc fragments with engineered CH3 domain to create a “knob” in one and a “hole” in the other to promote heterodimerization.

[0195] In yet another example, the tri-specific antibody may comprise a first chain comprising the anti-OX40 V_{H} fragment fused with the heavy chain of the anti-B7H3 antibody such as that of B7H3 Ab1 or B7H3 Ab2, and a second chain comprising the Fab fragment of anti-B7H3 HC and anti-CD3 V_{H} and CH1 fragment of anti-CD3 LC and an Fc fragment (e.g., a whole Fc fragment or a portion thereof such as CH2-CH3) and anti-OX40 V_{L} fragment; and a third chain that is the light chain of the anti-B7H3 antibody; and a fourth chain that is anti-CD3 V_{L} with CH1 fragment of anti-CD3 HC. Two Fc fragments with engineered CH3 domain to create a “knob” in one and a “hole” in the other to promote heterodimerization.

[0196] In some examples, the anti-B7H3/CD3/OX40 tri-specific antibodies may comprise an anti-CD3 moiety in fused V_{H} and V_{L} fragment format (scFv) and an anti-B7H3 moiety in multi-chain format. For example, the tri-specific antibody may comprise a first chain comprising anti-OX40 scFv fragment fused with the heavy chain of the parent anti-B7H3 antibody such as that of B7H3 Ab1 or B7H3 Ab2; a second chain comprising the Fab fragment of anti-B7H3 HC and anti-CD3 scFv fragment and an Fc fragment (e.g., a whole Fc fragment or a portion thereof such as CH2-CH3); a third chain that is the light chain of the anti-B7H3 antibody. Two Fc fragments with engineered CH3 domain to create a “knob” in one and a “hole” in the other to promote heterodimerization.

[0197] In another example, the tri-specific antibody may comprise a first chain comprising anti-OX40 scFv fragment fused with the heavy chain of the parent anti-B7H3 antibody; a second chain comprising the Fab fragment of anti-B7H3 HC and anti-CD3 scFv fragment and an Fc fragment (e.g., a whole Fc fragment or a portion thereof such as CH2-CH3) and anti-OX40 scFv fragment; a third chain that is the light chain of the anti-B7H3 antibody. Two Fc fragments with engineered CH3 domain to create a “knob” in one and a “hole” in the other to promote heterodimerization.

[0198] In yet another example, the tri-specific antibody may comprise a first chain comprising the V_{H} fragment of anti-B7H3 moiety and anti-CD3 V_{H} fragment and an Fc fragment (e.g., a whole Fc fragment or a portion thereof such as CH2-CH3) and anti-OX40 scFv fragment; a second chain comprising the V_{H} fragment of anti-B7H3 moiety and anti-CD3 V_{L} fragment and an Fc fragment (e.g., a whole Fc fragment or a portion thereof such as CH2-CH3) and anti-OX40 scFv fragment; and a third chain that is the light chain of anti-B7H3 antibody. Two Fc fragments with engineered CH3 domain to create a “knob” in one and a “hole” in the other to promote heterodimerization.

[0199] For example, the tri-specific antibody may comprise a first chain comprising the V_{H} fragment of anti-B7H3 moiety and anti-CD3 V_{H} fragment and an Fc fragment (e.g., a whole Fc fragment or a portion thereof such as CH2-CH3) and anti-OX40 scFv fragment; a second chain comprising the V_{H} fragment of anti-B7H3 moiety and anti-CD3 V_{L} fragment and an Fc fragment (e.g., a whole Fc fragment or a portion thereof such as CH2-CH3); and a third chain that is the light chain of anti-B7H3 antibody. Two Fc fragments with engineered CH3 domain to create a “knob” in one and a “hole” in the other to promote heterodimerization.

[0200] Alternatively, the tri-specific antibody may comprise a first chain comprising the V_{H} fragment of anti-B7H3 moiety and anti-CD3 V_{H} fragment and an Fc fragment (e.g., a whole Fc fragment or a portion thereof such as CH2-CH3); a second chain comprising the V_{H} fragment of anti-B7H3 moiety and anti-CD3 V_{L} fragment and an Fc fragment (e.g., a whole Fc fragment or a portion thereof such as CH2-CH3) and anti-OX40 scFv fragment; and a third chain that is the light chain of anti-B7H3 antibody. Two Fc fragments with engineered CH3 domain to create a “knob” in one and a “hole” in the other to promote heterodimerization.

[0201] In addition, the tri-specific antibody may comprise a first chain comprising the V_{H} fragment of anti-B7H3 moiety and anti-CD3 V_{H} fragment and an Fc fragment (e.g., a whole Fc fragment or a portion thereof such as CH2-CH3) and anti-OX40 V_{H} fragment; a second chain comprising the V_{H} fragment of anti-B7H3 moiety and anti-CD3 V_{L} fragment and an Fc fragment (e.g., a whole Fc fragment or a portion thereof such as CH2-CH3) and anti-OX40 V_{L} fragment; and a third chain that is the light chain of anti-B7H3 antibody. Two Fc fragments with engineered CH3 domain to create a “knob” in one and a “hole” in the other to promote heterodimerization.

[0202] More over, the tri-specific antibody may comprise a first chain comprising the V_{H} fragment of anti-B7H3 moiety and anti-CD3 V_{H} fragment and an Fc fragment (e.g., a whole Fc fragment or a portion thereof such as CH2-CH3); a second chain comprising the V_{H} fragment of anti-B7H3 moiety and anti-CD3 V_{L} fragment and an Fc fragment (e.g., a whole Fc fragment or a portion thereof such as CH2-CH3); and a third chain comprising the light chain of anti-B7H3 antibody and anti-OX40 scFv fragment. Two Fc fragments with engineered CH3 domain to create a “knob” in one and a “hole” in the other to promote heterodimerization. Further, the tri-specific antibody may comprise a first chain comprising the heavy chain of anti-B7H3 and anti-OX40 scFv fragment; a second chain comprising the heavy chain of anti-B7H3 and anti-CD3 scFv fragment; and a third chain that is the light chain of anti-B7H3 antibody. Two Fc fragments with engineered CH3 domain to create a “knob” in one and a “hole” in the other to promote heterodimerization.

[0203] In another example, the tri-specific antibody may comprise a first chain that the heavy chain of anti-B7H3 antibody; a second chain comprising the V_{H} fragment of anti-OX40 moiety and anti-CD3 V_{H} and CH1 of anti-CD3 LC and an Fc fragment (e.g., a whole Fc fragment or a portion thereof such as CH2-CH3); a third chain comprising the light chain of anti-B7H3 and anti-CD3 V_{L} and CH1 of anti-CD3 HC; and a fourth chain that is the light chain of anti-B7H3 antibody. Two Fc fragments with engineered CH3 domain to create a “knob” in one and a “hole” in the other to promote heterodimerization.

[0204] In some examples, any of the anti-B7H3/CD3/OX40 trispecific antibodies may comprise mutations for enhancing heterodimerization and/or reducing protein A binding such as those disclosed herein. Alternatively or in addition, the anti-B7H3/CD3/OX40 trispecific antibodies may be in CrossMab format.

[0205] Exemplary anti-B7H3/CD3/OX40 tri-specific antibodies are provided in Example 11 and Table 11, which are within the scope of the present disclosure.

(viii) Anti-B7H3/CD3/GITR Tri-Specific Antibodies

[0206] In some embodiments, the tri-specific antibodies disclosed herein binds B7H3, CD3 and GITR, for example, human B7H3, human CD3 and GITR. Any antibody capable of binding to B7H3, CD3 and GITR can be used in constructing the tri-specific antibodies disclosed herein. In some examples, the anti-B7H3, anti-CD3 and anti-GITR portion of the tri-specific antibody described herein may be derived from any of the anti-CD3 and anti-GITR parent antibodies provided in Table 1 above. One or more of the anti-B7H3, anti-CD3 and anti-GITR antigen binding moieties may comprise the same heavy chain and/or light chain CDRs as a parent antibody. Alternatively, one or more of the antigen binding moieties may comprise substantially similar heavy chain and/or light chain CDRs as those of the parent antibody (e.g., comprising no more than 5, 4, 3, 2, or 1 amino acid residue variations as compared with the parent antibody). In some instances, one or more of the anti-B7H3, anti-CD3 and anti-GITRantigen binding moiety in the tri-specific antibody may have the same heavy chain variable region and/or the same light chain variable region as the parent antibody. For example, one or more of the antigen binding moiety in the tri-specific antibody may have the same heavy chain and/or the same light chain as the parent antibody.

[0207] In some examples, the anti-B7H3/CD3/GITR tri-specific antibodies may be a multi-chain molecule comprising an anti-GITR moiety in scFv format and an anti-B7H3 moiety and anti-CD3 in V_{H}/V_{L} and/or Fab format. For example, the tri-specific antibody may comprise a first chain comprising the anti-GITR scFv fragment fused with the heavy chain of the anti-B7H3 antibody such as that of B7H3 Ab1 or B7H3 Ab2, and a second chain comprising the Fab fragment of anti-B7H3 HC and anti-CD3 V_{H} and CH1 fragment of anti-CD3 LC and an Fc fragment (e.g., a whole Fc fragment or a portion thereof such as CH2-CH3) and anti-GITR scFv fragment; and a third chain that is the light chain of the anti-B7H3 antibody; and a fourth chain that is anti-CD3 V_{L} with CH1 fragment of anti-CD3 HC. Two Fc fragments with engineered CH3 domain to create a “knob” in one and a “hole” in the other to promote heterodimerization.

[0208] In some examples, the anti-B7H3/CD3/GITR tri-specific antibodies may be a multi-chain molecule comprising an anti-GITR moiety in scFv format and an anti-B7H3 moiety and anti-CD3 V_{H}/V_{L} and/or Fab fragment format. For example, the tri-specific antibody may comprise a first chain that is the heavy chain of an anti-B7H3 parent antibody such as B7H3 Ab1 or B7H3 Ab2, and a second chain comprising the Fab fragment of anti-B7H3 HC and anti-CD3 V_{H} and CH1 fragment of anti-CD3 LC and an Fc fragment (e.g., a whole Fc fragment or a portion thereof such as CH2-CH3) and anti-GITR scFv fragment; and a third chain that is the light chain of the anti-B7H3 antibody; and a fourth chain that is anti-CD3 V_{L} with CH1 fragment of anti-CD3 HC. Two Fc fragments with engineered CH3 domain to create a “knob” in one and a “hole” in the other to promote heterodimerization.

[0209] In some examples, the anti-B7H3/CD3/GITR tri-specific antibodies may be a multi-chain molecule comprising an anti-GITR moiety in scFv format and an anti-B7H3 moiety and anti-CD3 in V_{H}/V_{L} and/or Fab format. For example, the tri-specific antibody may comprise a first chain comprising the anti-GITR V_{H} fragment fused with the heavy chain of the anti-B7H3 parent antibody such as B7H3 Ab1 or B7H3 Ab2, and a second chain comprising the Fab fragment of anti-B7H3 HC and anti-CD3 V_{H} and CH1 fragment of anti-CD3 LC and an Fc fragment (e.g., a whole Fc fragment or a portion thereof such as CH2-CH3) and anti-GITR V_{L} fragment; and a third chain that is the light chain of the anti-B7H3 antibody; and a fourth chain that is anti-CD3 V_{L} with CH1 fragment of anti-CD3 HC. Two Fc fragments with engineered CH3 domain to create a “knob” in one and a “hole” in the other to promote heterodimerization.

[0210] In some examples, the anti-B7H3/CD3/GITR tri-specific antibodies may comprise an anti-CD3 moiety in fused V_{H} and V_{L} fragment format (scFv) and an anti-B7H3 moiety in multi-chain format. For example, the tri-specific antibody may comprise a first chain comprising anti-GITR scFv fragment fused with the heavy chain of the parent anti-B7H3 antibody such as B7H3 Ab1 or B7H3 Ab2; a second chain comprising the Fab fragment of anti-B7H3 HC and anti-CD3 scFv fragment and an Fc fragment (e.g., a whole Fc fragment or a portion thereof such as CH2-CH3); a third chain that is the light chain of the anti-B7H3 antibody. Two Fc fragments with engineered CH3 domain to create a “knob” in one and a “hole” in the other to promote heterodimerization.

[0211] In some examples, the anti-B7H3/CD3/GITR tri-specific antibodies may be a multi-chain molecule comprising an anti-CD3 moiety in fused V_{H} and V_{L} fragment format (scFv) and an anti-B7H3 moiety in multi-chain format. For example, the tri-specific antibody may comprise a first chain is that the heavy chain of the parent anti-B7H3 antibody, such as B7H3 Ab1 or B7H3 Ab2; a second chain comprising the Fab fragment of anti-B7H3 HC and anti-CD3 scFv fragment and an Fc fragment (e.g., a whole Fc fragment or a portion thereof such as CH2-CH3) and anti-GITR scFv fragment; a third chain that is the light chain of the anti-B7H3 antibody. Two Fc fragments with engineered CH3 domain to create a “knob” in one and a “hole” in the other to promote heterodimerization.

[0212] In some examples, the anti-B7H3/CD3/GITR tri-specific antibodies may comprise an anti-CD3 moiety in fused V_{H} and V_{L} fragment format and an anti-B7H3 moiety in multi-chain format. For example, the tri-specific antibody may comprise a first chain comprising the V_{H} fragment of anti-B7H3 moiety and anti-CD3 V_{H} fragment and an Fc fragment (e.g., a whole Fc fragment or a portion thereof such as CH2-CH3) and anti-GITR scFv fragment; a second chain comprising the V_{H} fragment of anti-B7H3 moiety and anti-CD3 V_{L} fragment and an Fc fragment (e.g., a whole Fc fragment or a portion thereof such as CH2-CH3) and anti-GITR scFv fragment; and a third chain that is the light chain of anti-B7H3 antibody. Two Fc fragments with engineered CH3 domain to create a “knob” in one and a “hole” in the other to promote heterodimerization.

[0213] In some examples, the anti-B7H3/CD3/GITR tri-specific antibodies may be a multi-chain molecule comprising an anti-CD3 moiety in fused V_{H} and V_{L} fragment format (scFv) and an anti-B7H3 moiety in multi-chain format. For example, the tri-specific antibody may comprise a first chain comprising the V_{H} fragment of anti-B7H3 moiety and anti-CD3 V_{H} fragment and an Fc fragment (e.g., a whole Fc fragment or a portion thereof such as CH2-CH3); a second chain comprising the V_{H} fragment of anti-B7H3 moiety and anti-CD3 V_{L} fragment and an Fc fragment (e.g., a whole Fc fragment or a portion thereof such as CH2-CH3) and a third chain comprising the light chain of anti-B7H3 antibody and anti-GITR scFv fragment. Two Fc fragments with engineered CH3 domain to create a “knob” in one and a “hole” in the other to promote heterodimerization.

[0214] In some examples, the anti-B7H3/CD3/GITR tri-specific antibodies may comprise an anti-CD3 moiety in fused V_{H} and V_{L} fragment format and an anti-B7H3 moiety in multi-chain format. For example, the tri-specific antibody may comprise a first chain that comprises the heavy chain of anti-B7H3 antibody; a second chain comprising the V_{H} fragment of anti-GITR moiety and anti-CD3 V_{H} and CH1 of anti-CD3 LC and an Fc fragment (e.g., a whole Fc fragment or a portion thereof such as CH2-CH3); a third chain comprising the light chain of anti-B7H3 and anti-CD3 V_{L} and CH1 of anti-CD3 HC; and a fourth chain that is the light chain of anti-B7H3 antibody. Two Fc fragments with engineered CH3 domain to create a “knob” in one and a “hole” in the other to promote heterodimerization.

[0215] In some examples, any of the anti-B7H3/CD3/GITR tri-specific antibodies may comprise mutations for enhancing heterodimerization and/or reducing protein A binding such as those disclosed herein. Alternatively or in addition, any of the antigen binding moieties in the tri-specific antibody may be in CrossMab format.

[0216] Exemplary anti-B7H3/CD3/GITR bi-specific antibodies are provided in Example 12 and Table 12 below, which are within the scope of the present disclosure.

### (ix) Anti-B7H3/CD137/GITR Tri-Specific Antibodies

[0217] In some embodiments, the tri-specific antibodies disclosed herein binds B7H3, CD137 and GITR, for example, human B7H3, human CD137 and human GITR. Any antibody capable of binding to B7H3, CD137 and GITR can be used in constructing the tri-specific antibodies disclosed herein. In some examples, the anti-B7H3, anti-CD137 and anti-GITR portion of the tri-specific antibody described herein may be derived from any of the anti-CD137 and anti-GITR parent antibodies provided in Table 1 above. One or more of the anti-B7H3, anti-CD137 and anti-GITR antigen binding moieties may comprise the same heavy chain and/or light chain CDRs as a parent antibody. Alternatively, one or more of the antigen binding moieties may comprise substantially similar heavy chain and/or light chain CDRs as those of the parent antibody (e.g., comprising no more than 5, 4, 3, 2, or 1 amino acid residue variations as compared with the parent antibody). In some instances, one or more of the anti-B7H3, anti-CD137 and anti-GITRantigen binding moiety in the tri-specific antibody may have the same heavy chain variable region and/or the same light chain variable region as the parent antibody. For example, one or more of the antigen binding moiety in the tri-specific antibody may have the same heavy chain and/or the same light chain as the parent antibody.

[0218] In some examples, the anti-B7H3/CD137/GITR tri-specific antibodies may comprise an anti-B7H3 binding moiety in multi-chain format (IgG like), an anti-CD137 binding moiety in scFv format, and an anti-GITR binding moiety in scFv format. The anti-CD137 scFv may be fused to the light chains of the anti-B7H3 binding moiety and the anti-GITR scFv may be fused to the heavy chains of the anti-B7H3 binding moiety. Alternatively, the anti-CD137 scFv may be fused to the heavy chains of the anti-B7H3 binding moiety and the anti-GITR scFv may be fused to the light chains of the anti-B7H3 binding moiety. In another example, the anti-CD137 scFv may be fused to one heavy chain of the anti-B7H3 binding moiety and the anti-GITR scFv may be fused to the other heavy chain of the anti-B7H3 binding moiety.

[0219] In some examples, any of the anti-B7H3/CD137/GITR tri-specific antibodies may comprise mutations for enhancing heterodimerization and/or reducing protein A binding such as those disclosed herein. Alternatively or in addition, any of the antigen binding moieties in the tri-specific antibody may be in CrossMab format.

[0220] Exemplary anti-B7H3/CD137/GITR tri-specific antibodies are provided in Example 13 and Table 13 below, which are within the scope of the present disclosure.

### (xi) Anti-B7H3/CD137/OX40 Tri-Specific Antibodies

[0221] In some embodiments, the tri-specific antibodies disclosed herein binds B7H3, CD137 and OX40, for example, human B7H3, human CD137 and human OX40. Any antibody capable of binding to B7H3, CD137 and OX40 can be used in constructing the tri-specific antibodies disclosed herein. In some examples, the anti-B7H3, anti-CD137 and anti-OX40 portion of the tri-specific antibody described herein may be derived from any of the anti-CD137 and anti-OX40 parent antibodies provided in Table 1 above. One or more of the anti-B7H3, anti-CD137 and anti-OX40 antigen binding moieties may comprise the same heavy chain and/or light chain CDRs as a parent antibody. Alternatively, one or more of the antigen binding moieties may comprise substantially similar heavy chain and/or light chain CDRs as those of the parent antibody (e.g., comprising no more than 5, 4, 3, 2, or 1 amino acid residue variations as compared with the parent antibody). In some instances, one or more of the anti-B7H3, anti-CD137 and anti-OX40 antigen binding moiety in the tri-specific antibody may have the same heavy chain variable region and/or the same light chain variable region as the parent antibody. For example, one or more of the antigen binding moiety in the tri-specific antibody may have the same heavy chain and/or the same light chain as the parent antibody.

[0222] In some examples, the anti-B7H3/CD137/OX40 tri-specific antibodies may comprise an anti-B7H3 binding moiety in multi-chain format (IgG like), an anti-CD137 binding moiety in scFv format, and an anti-OX40 binding moiety in scFv format. The anti-CD137 scFv may be fused to the light chains of the anti-B7H3 binding moiety and the anti-OX40 scFv may be fused to the heavy chains of the anti-B7H3 binding moiety. Alternatively, the anti-CD137 scFv may be fused to the heavy chains of the anti-B7H3 binding moiety and the anti-OX40 scFv may be fused to the light chains of the anti-B7H3 binding moiety. In another example, the anti-CD137 scFv may be fused to one heavy chain of the anti-B7H3 binding moiety and the anti-OX40 scFv may be fused to the other heavy chain of the anti-B7H3 binding moiety.

[0223] In some examples, any of the anti-B7H3/CD137/OX40 tri-specific antibodies may comprise mutations for enhancing heterodimerization and/or reducing protein A binding such as those disclosed herein. Alternatively or in addition, any of the antigen binding moieties in the tri-specific antibody may be in CrossMab format.

[0224] Exemplary anti-B7H3/CD137/OX40 tri-specific antibodies are provided in Example 14 and Table 14 below, which are within the scope of the present disclosure.

### III. Methods for Antibody Preparation

[0225] Any of the antibodies, including bi-specific antibodies, as described herein can be made by any method known in the art. See, for example, Harlow and Lane, (1998) Antibodies: A Laboratory Manual, Cold Spring Harbor Laboratory, New York. Antigen-binding fragments of an intact antibody (full-length antibody) can be prepared via routine methods. For example, F(ab′)2 fragments can be produced by pepsin digestion of an antibody molecule, and Fab fragments that can be generated by reducing the disulfide bridges of F(ab′)2 fragments.

[0226] Genetically engineered antibodies, such as humanized antibodies, chimeric antibodies, single-chain antibodies, and bi-specific antibodies, can be produced via, e.g., conventional recombinant technology. In one example, DNA encoding a monoclonal antibodies specific to a target antigen can be readily isolated and sequenced using conventional procedures (e.g., by using oligonucleotide probes that are capable of binding specifically to genes encoding the heavy and light chains of the monoclonal antibodies). The hybridoma cells serve as a preferred source of such DNA. Once isolated, the DNA may be placed into one or more expression vectors, which are then transfected into host cells such as E. coli cells, simian COS cells, Chinese hamster ovary (CHO) cells, or myeloma cells that do not otherwise produce immunoglobulin protein, to obtain the synthesis of monoclonal antibodies in the recombinant host cells. See, e.g., PCT Publication No. WO 87/04462. The DNA can then be modified, for example, by substituting the coding sequence for human heavy and light chain constant domains in place of the homologous murine sequences, Morrison et al., (1984) Proc. Nat. Acad. Sci. 81:6851, or by covalently joining to the immunoglobulin coding sequence all or part of the coding sequence for a non-immunoglobulin polypeptide. In that manner, genetically engineered antibodies, such as “chimeric” or “hybrid” antibodies; can be prepared that have the binding specificity of a target antigen.

[0227] Techniques developed for the production of “chimeric antibodies” are well known in the art. See, e.g., Morrison et al. (1984) Proc. Natl. Acad. Sci. USA 81, 6851; Neuberger et al. (1984) Nature 312, 604; and Takeda et al. (1984) Nature 314:452.

[0228] Methods for constructing humanized antibodies are also well known in the art. See, e.g., Queen et al., Proc. Natl. Acad. Sci. USA, 86:10029-10033 (1989). In one example, variable regions of V_{H} and V_{L} of a parent non-human antibody are subjected to three-dimensional molecular modeling analysis following methods known in the art. Next, framework amino acid residues predicted to be important for the formation of the correct CDR structures are identified using the same molecular modeling analysis. In parallel, human V_{H} and V_{L} chains having amino acid sequences that are homologous to those of the parent non-human antibody are identified from any antibody gene database using the parent V_{H} and V_{L} sequences as search queries. Human V_{H} and V_{L} acceptor genes are then selected.

[0229] The CDR regions within the selected human acceptor genes can be replaced with the CDR regions from the parent non-human antibody or functional variants thereof. When necessary, residues within the framework regions of the parent chain that are predicted to be important in interacting with the CDR regions (see above description) can be used to substitute for the corresponding residues in the human acceptor genes.

[0230] A single-chain antibody can be prepared via recombinant technology by linking a nucleotide sequence coding for a heavy chain variable region and a nucleotide sequence coding for a light chain variable region. Preferably, a flexible linker is incorporated between the two variable regions. Alternatively, techniques described for the production of single chain antibodies (U.S. Pat. Nos. 4,946,778 and 4,704,692) can be adapted to produce a phage or yeast scFv library and scFv clones specific to a target antigen as disclosed herein can be identified from the library following routine procedures.

[0231] In some examples, any of the antibodies, including bi-specific antibodies as disclosed herein can be prepared by recombinant technology as exemplified below.

[0232] Nucleic acids encoding the heavy and light chain of the antibody as described herein can be cloned into one expression vector, each nucleotide sequence being in operable linkage to a suitable promoter. In one example, each of the nucleotide sequences encoding the heavy chain and light chain is in operable linkage to a distinct prompter. Alternatively, the nucleotide sequences encoding the heavy chain and the light chain can be in operable linkage with a single promoter, such that both heavy and light chains are expressed from the same promoter. When necessary, an internal ribosomal entry site (IRES) can be inserted between the heavy chain and light chain encoding sequences.

[0233] In some examples, the nucleotide sequences encoding the two chains of the antibody are cloned into two vectors, which can be introduced into the same or different cells. When the two chains are expressed in different cells, each of them can be isolated from the host cells expressing such and the isolated heavy chains and light chains can be mixed and incubated under suitable conditions allowing for the formation of the antibody.

[0234] Generally, a nucleic acid sequence encoding one or all chains of an antibody can be cloned into a suitable expression vector in operable linkage with a suitable promoter using methods known in the art. For example, the nucleotide sequence and vector can be contacted, under suitable conditions, with a resmultiction enzyme to create complementary ends on each molecule that can pair with each other and be joined together with a ligase. Alternatively, synthetic nucleic acid linkers can be ligated to the termini of a gene. These synthetic linkers contain nucleic acid sequences that correspond to a particular resmultiction site in the vector.

[0235] The selection of expression vectors/promoter would depend on the type of host cells for use in producing the antibodies.

[0236] A variety of promoters can be used for expression of the antibodies described herein, including, but not limited to, cytomegalovirus (CMV) intermediate early promoter, a viral LTR such as the Rous sarcoma virus LTR, HIV-LTR, HTLV-1 LTR, the simian virus 40 (SV40) early promoter, E. coli lac UV5 promoter, and the herpes simplex tk virus promoter.

[0237] Regulatable promoters can also be used. Such regulatable promoters include those using the lac repressor from E. coli as a transcription modulator to regulate transcription from lac operator-bearing mammalian cell promoters (Brown, M. et al., Cell, 49:603-612 (1987)), those using the tetracycline repressor (tetR) (Gossen, M., and Bujard, H., Proc. Natl. Acad. Sci. USA 89:5547-5551 (1992); Yao, F. et al., Human Gene Therapy, 9:1939-1950 (1998); Shockelt, P., et al., Proc. Natl. Acad. Sci. USA, 92:6522-6526 (1995)). Other systems include FK506 dimer, VP16 or p65 using astradiol, RU486, diphenol murislerone, or rapamycin. Inducible systems are available from Invitrogen, Clontech and Ariad.

[0238] Regulatable promoters that include a repressor with the operon can be used. In one embodiment, the lac repressor from E. coli can function as a transcriptional modulator to regulate transcription from lac operator-bearing mammalian cell promoters (M. Brown et al., Cell, 49:603-612 (1987); Gossen and Bujard (1992); M. Gossen et al., Natl. Acad. Sci. USA, 89:5547-5551 (1992)) combined the tetracycline repressor (tetR) with the transcription activator (VP 16) to create a tetR-mammalian cell transcription activator fusion protein, tTa (tetR-VP 16), with the tetO-bearing minimal promoter derived from the human cytomegalovirus (hCMV) major immediate-early promoter to create a tetR-tet operator system to control gene expression in mammalian cells. In one embodiment, a tetracycline inducible switch is used. The tetracycline repressor (tetR) alone, rather than the tetR-mammalian cell transcription factor fusion derivatives can function as potent trans-modulator to regulate gene expression in mammalian cells when the tetracycline operator is properly positioned downstream for the TATA element of the CMVIE promoter (Yao et al., Human Gene Therapy, 10(16):1392-1399 (2003)). One particular advantage of this tetracycline inducible switch is that it does not require the use of a tetracycline repressor-mammalian cells transactivator or repressor fusion protein, which in some instances can be toxic to cells (Gossen et al., Natl. Acad. Sci. USA, 89:5547-5551 (1992); Shockett et al., Proc. Natl. Acad. Sci. USA, 92:6522-6526 (1995)), to achieve its regulatable effects.

[0239] Additionally, the vector can contain, for example, some or all of the following: a selectable marker gene, such as the neomycin gene for selection of stable or transient transfectants in mammalian cells; enhancer/promoter sequences from the immediate early gene of human CMV for high levels of transcription; transcription termination and RNA processing signals from SV40 for mRNA stability; SV40 polyoma origins of replication and ColE1 for proper episomal replication; internal ribosome binding sites (IRESes), versatile multiple cloning sites; and T7 and SP6 RNA promoters for in vitro transcription of sense and antisense RNA. Suitable vectors and methods for producing vectors containing transgenes are well known and available in the art.

[0240] Examples of polyadenylation signals useful to practice the methods described herein include, but are not limited to, human collagen I polyadenylation signal, human collagen II polyadenylation signal, and SV40 polyadenylation signal.

[0241] One or more vectors (e.g., expression vectors) comprising nucleic acids encoding any of the antibodies may be introduced into suitable host cells for producing the antibodies. The host cells can be cultured under suitable conditions for expression of the antibody or any polypeptide chain thereof. Such antibodies or polypeptide chains thereof can be recovered by the cultured cells (e.g., from the cells or the culture supernatant) via a conventional method, e.g., affinity purification. If necessary, polypeptide chains of the antibody can be incubated under suitable conditions for a suitable period of time allowing for production of the antibody.

[0242] In some embodiments, methods for preparing an antibody described herein involve a recombinant expression vector that encodes both the heavy chain and the light chain of an antibody (including bi-specific antibody) as also described herein. The recombinant expression vector can be introduced into a suitable host cell (e.g., a dhfr− CHO cell) by a conventional method, e.g., calcium phosphate-mediated transfection. Positive transformant host cells can be selected and cultured under suitable conditions allowing for the expression of the two polypeptide chains that form the antibody, which can be recovered from the cells or from the culture medium. When necessary, the two chains recovered from the host cells can be incubated under suitable conditions allowing for the formation of the antibody.

[0243] In one example, two recombinant expression vectors are provided, one encoding a first chain (e.g., a heavy chain) of the antibody and the other encoding a second chain (e.g., a light chain) of the antibody. Both of the two recombinant expression vectors can be introduced into a suitable host cell (e.g., dhfr− CHO cell) by a conventional method, e.g., calcium phosphate-mediated transfection. Alternatively, each of the expression vectors can be introduced into a suitable host cells. Positive transformants can be selected and cultured under suitable conditions allowing for the expression of the polypeptide chains of the antibody. When the two expression vectors are introduced into the same host cells, the antibody produced therein can be recovered from the host cells or from the culture medium. If necessary, the polypeptide chains can be recovered from the host cells or from the culture medium and then incubated under suitable conditions allowing for formation of the antibody. When the two expression vectors are introduced into different host cells, each of them can be recovered from the corresponding host cells or from the corresponding culture media. The two polypeptide chains can then be incubated under suitable conditions for formation of the antibody.

[0244] Standard molecular biology techniques are used to prepare the recombinant expression vector, transfect the host cells, select for transformants, culture the host cells and recovery of the antibodies from the culture medium. For example, some antibodies can be isolated by affinity chromatography with a Protein A or Protein G coupled mamultix.

[0245] Any of the nucleic acids encoding the first chain (e.g., the heavy chain), the second chain (e.g., the light chain), or both of an antibody as described herein, vectors (e.g., expression vectors) containing such; and host cells comprising the vectors are within the scope of the present disclosure.

### IV. Pharmaceutical Compositions

[0246] Any of the antibodies, including bi-specific antibodies disclosed herein, as well as the encoding nucleic acids or nucleic acid sets, vectors comprising such, or host cells comprising the vectors, as described herein can be mixed with a pharmaceutically acceptable carrier (excipient) to form a pharmaceutical composition for use in treating a target disease. “Acceptable” means that the carrier must be compatible with the active ingredient of the composition (and preferably, capable of stabilizing the active ingredient) and not deleterious to the subject to be treated. Pharmaceutically acceptable excipients (carriers) including buffers, which are well known in the art. See, e.g., Remington: The Science and Practice of Pharmacy 20th Ed. (2000) Lippincott Williams and Wilkins, Ed. K. E. Hoover.

[0247] The pharmaceutical compositions to be used in the present methods can comprise pharmaceutically acceptable carriers, excipients, or stabilizers in the form of lyophilized formulations or aqueous solutions. (Remington: The Science and Practice of Pharmacy 20th Ed. (2000) Lippincott Williams and Wilkins, Ed. K. E. Hoover). Acceptable carriers, excipients, or stabilizers are nontoxic to recipients at the dosages and concentrations used, and may comprise buffers such as phosphate, citrate, and other organic acids; antioxidants including ascorbic acid and methionine; preservatives (such as octadecyldimethylbenzyl ammonium chloride; hexamethonium chloride; benzalkonium chloride, benzethonium chloride; phenol, butyl or benzyl alcohol; alkyl parabens such as methyl or propyl paraben; catechol; resorcinol; cyclohexanol; 3-pentanol; and m-cresol); low molecular weight (less than about 10 residues) polypeptides; proteins, such as serum albumin, gelatin, or immunoglobulins; hydrophilic polymers such as polyvinylpyrrolidone; amino acids such as glycine, glutamine, asparagine, histidine, arginine, or lysine; monosaccharides, disaccharides, and other carbohydrates including glucose, mannose, or dextrans; chelating agents such as EDTA; sugars such as sucrose, mannitol, trehalose or sorbitol; salt-forming counter-ions such as sodium; metal complexes (e.g. Zn-protein complexes); and/or non-ionic surfactants such as TWEEN™ PLURONICS™ or polyethylene glycol (PEG).

[0248] In some examples, the pharmaceutical composition described herein comprises liposomes containing the antibodies (or the encoding nucleic acids) which can be prepared by methods known in the art, such as described in Epstein, et al., Proc. Natl. Acad. Sci. USA 82:3688 (1985); Hwang, et al., Proc. Natl. Acad. Sci. USA 77:4030 (1980); and U.S. Pat. Nos. 4,485,045 and 4,544,545. Liposomes with enhanced circulation time are disclosed in U.S. Pat. No. 5,013,556. Particularly useful liposomes can be generated by the reverse phase evaporation method with a lipid composition comprising phosphatidylcholine, cholesterol and PEG-derivatized phosphatidylethanolamine (PEG-PE). Liposomes are extruded through filters of defined pore size to yield liposomes with the desired diameter.

[0249] The antibodies, or the encoding nucleic acid(s), may also be entrapped in microcapsules prepared, for example, by coacervation techniques or by interfacial polymerization, for example, hydroxymethylcellulose or gelatin-microcapsules and poly-(methylmethacylate) microcapsules, respectively, in colloidal drug delivery systems (for example, liposomes, albumin microspheres, microemulsions, nano-particles and nanocapsules) or in macroemulsions. Such techniques are known in the art, see, e.g., Remington, The Science and Practice of Pharmacy 20th Ed. Mack Publishing (2000).

[0250] In other examples, the pharmaceutical composition described herein can be formulated in sustained-release format. Suitable examples of sustained-release preparations include semipermeable mamultices of solid hydrophobic polymers containing the antibody, which mamultices are in the form of shaped articles, e.g. films, or microcapsules. Examples of sustained-release mamultices include polyesters, hydrogels (for example, poly(2-hydroxyethyl-methacrylate), or poly(vinyl alcohol)), polylactides (U.S. Pat. No. 3,773,919), copolymers of L-glutamic acid and 7 ethyl-L-glutamate, non-degradable ethylene-vinyl acetate, degradable lactic acid-glycolic acid copolymers such as the LUPRON DEPOT™ (injectable microspheres composed of lactic acid-glycolic acid copolymer and leuprolide acetate), sucrose acetate isobutyrate, and poly-D-(−)-3-hydroxybutyric acid.

[0251] The pharmaceutical compositions to be used for in vivo administration must be sterile. This is readily accomplished by, for example, filtration through sterile filtration membranes. Therapeutic antibody compositions are generally placed into a container having a sterile access port, for example, an intravenous solution bag or vial having a stopper pierceable by a hypodermic injection needle.

[0252] The pharmaceutical compositions described herein can be in unit dosage forms such as tablets, pills, capsules, powders, granules, solutions or suspensions, or suppositories, for oral, parenteral or rectal administration, or administration by inhalation or insufflation.

[0253] For preparing solid compositions such as tablets, the principal active ingredient can be mixed with a pharmaceutical carrier, e.g., conventional tableting ingredients such as corn starch, lactose, sucrose, sorbitol, talc, stearic acid, magnesium stearate, dicalcium phosphate or gums, and other pharmaceutical diluents, e.g., water, to form a solid preformulation composition containing a homogeneous mixture of a compound of the present invention, or a non-toxic pharmaceutically acceptable salt thereof. When referring to these preformulation compositions as homogeneous, it is meant that the active ingredient is dispersed evenly throughout the composition so that the composition may be readily subdivided into equally effective unit dosage forms such as tablets, pills and capsules. This solid preformulation composition is then subdivided into unit dosage forms of the type described above containing from 0.1 to about 500 mg of the active ingredient of the present invention. The tablets or pills of the novel composition can be coated or otherwise compounded to provide a dosage form affording the advantage of prolonged action. For example, the tablet or pill can comprise an inner dosage and an outer dosage component, the latter being in the form of an envelope over the former. The two components can be separated by an enteric layer that serves to resist disintegration in the stomach and permits the inner component to pass intact into the duodenum or to be delayed in release. A variety of materials can be used for such enteric layers or coatings, such materials including a number of polymeric acids and mixtures of polymeric acids with such materials as shellac, cetyl alcohol and cellulose acetate.

[0254] Suitable surface-active agents include, in particular, non-ionic agents, such as polyoxyethylenesorbitans (e.g., Tween™ 20, 40, 60, 80 or 85) and other sorbitans (e.g., Span™ 20, 40, 60, 80 or 85). Compositions with a surface-active agent will conveniently comprise between 0.05 and 5% surface-active agent, and can be between 0.1 and 2.5%. It will be appreciated that other ingredients may be added, for example mannitol or other pharmaceutically acceptable vehicles, if necessary.

[0255] Suitable emulsions may be prepared using commercially available fat emulsions, such as Intralipid™, Liposyn™, Infonutrol™, Lipofundin™ and Lipiphysan™. The active ingredient may be either dissolved in a pre-mixed emulsion composition or alternatively it may be dissolved in an oil (e.g., soybean oil, safflower oil, cottonseed oil, sesame oil, corn oil or almond oil) and an emulsion formed upon mixing with a phospholipid (e.g. egg phospholipids, soybean phospholipids or soybean lecithin) and water. It will be appreciated that other ingredients may be added, for example glycerol or glucose, to adjust the tonicity of the emulsion. Suitable emulsions will typically contain up to 20% oil, for example, between 5 and 20%. The fat emulsion can comprise fat droplets between 0.1 and 1.0 m, particularly 0.1 and 0.5 m, and have a pH in the range of 5.5 to 8.0.

[0256] The emulsion compositions can be those prepared by mixing an antibody with Intralipid™ or the components thereof (soybean oil, egg phospholipids, glycerol and water).

[0257] Pharmaceutical compositions for inhalation or insufflation include solutions and suspensions in pharmaceutically acceptable, aqueous or organic solvents, or mixtures thereof, and powders. The liquid or solid compositions may contain suitable pharmaceutically acceptable excipients as set out above. In some embodiments, the compositions are administered by the oral or nasal respiratory route for local or systemic effect.

[0258] Compositions in preferably sterile pharmaceutically acceptable solvents may be nebulized by use of gases. Nebulized solutions may be breathed directly from the nebulizing device or the nebulizing device may be attached to a face mask, tent or intermittent positive pressure breathing machine. Solution, suspension or powder compositions may be administered, preferably orally or nasally, from devices which deliver the formulation in an appropriate manner.

### V. Therapeutic Applications

[0259] Any of the anti-B7H3/CD40 bi-specific antibodies, anti-B7H3/CD137 bi-specific antibodies, anti-B7H3/GITR bi-specific antibodies, anti-B7H3/CD40 bi-specific antibodies, anti-B7H3/OX40 bi-specific antibodies, as well as any of the anti-GITR antibodies disclosed herein, may be used in clinical settings (e.g., therapeutic or diagnostic) or in non-clinical settings (e.g., for research purposes).

[0260] In some aspects, provided herein are methods of using any of the antibodies disclosed herein for modulating immune responses or for treating a targeting disease in a subject in need of the treatment. To practice the method disclosed herein, an effective amount of the pharmaceutical composition described herein can be administered to a subject (e.g., a human) in need of the treatment via a suitable route, such as intravenous administration, e.g., as a bolus or by continuous infusion over a period of time, by intramuscular, intraperitoneal, intracerebrospinal, subcutaneous, intra-articular, intrasynovial, intrathecal, oral, inhalation or topical routes. Commercially available nebulizers for liquid formulations, including jet nebulizers and ultrasonic nebulizers are useful for administration. Liquid formulations can be directly nebulized and lyophilized powder can be nebulized after reconstitution. Alternatively, the antibodies as described herein can be aerosolized using a fluorocarbon formulation and a metered dose inhaler, or inhaled as a lyophilized and milled powder.

[0261] The subject to be treated by the methods described herein can be a mammal, more preferably a human. Mammals include, but are not limited to, farm animals, sport animals, pets, primates, horses, dogs, cats, mice and rats. A human subject who needs the treatment may be a human patient having, at risk for, or suspected of having a target disease/disorder, such as a cancer or an immune disorder such as an autoimmune disease.

[0262] Examples of cancers include, but are not limited to, breast cancer; biliary tract cancer; bladder cancer; brain cancer including glioblastomas and medulloblastomas; cervical cancer; choriocarcinoma; colon cancer; endomemultial cancer; esophageal cancer; gasmultic cancer; hematological neoplasms including acute lymphocytic and myelogenous leukemia, e.g., B Cell CLL; T-cell acute lymphoblastic leukemia/lymphoma; hairy cell leukemia; chronic myelogenous leukemia, multiple myeloma; AIDS-associated leukemias and adult T-cell leukemia/lymphoma; intraepithelial neoplasms including Bowen's disease and Paget's disease; liver cancer; lung cancer; lymphomas including Hodgkin's disease and lymphocytic lymphomas; neuroblastomas; oral cancer including squamous cell carcinoma; ovarian cancer including those arising from epithelial cells, stromal cells, germ cells and mesenchymal cells; pancreatic cancer; prostate cancer; rectal cancer; sarcomas including leiomyosarcoma, rhabdomyosarcoma, liposarcoma, fibrosarcoma, and osteosarcoma; skin cancer including melanoma, Merkel cell carcinoma, Kaposi's sarcoma, basal cell carcinoma, and squamous cell cancer; testicular cancer including germinal tumors such as seminoma, non-seminoma (teratomas, choriocarcinomas), stromal tumors, and germ cell tumors; thyroid cancer including thyroid adenocarcinoma and medullar carcinoma; and renal cancer including adenocarcinoma and Wilms tumor.

[0263] A subject having a target cancer can be identified by routine medical examination, e.g., laboratory tests, organ functional tests, CT scans, ultrasounds, and/or genetic testing. In some embodiments, the subject to be treated by the method described herein may be a human cancer patient who has undergone or is subjecting to an anti-cancer therapy, for example, chemotherapy, radiotherapy, immunotherapy, or surgery.

[0264] Immune disorders refer to a dysfunction of the immune system. Examples include autoimmune diseases, immunodeficiencies, or allergies. In some embodiments, the target disease for treatment is an autoimmune disease. Examples include, but are not limited to, rheumatoid arthritis (RA), systemic lupus erythematosus (SLE), Myasthenia Gravis (MG), Graves' Disease, Idiopathic Thrombocytopenia Purpura (ITP), Guillain-Barre Syndrome, autoimmune myocarditis, Membrane Glomerulonephritis, Hyper IgM syndrome, diabetes mellitus, Type I or Type II diabetes, multiple sclerosis, Reynaud's syndrome, autoimmune thyroiditis, gasmultitis, Celiac Disease, Vitiligo, Hepatitis, primary biliary cirrhosis, inflammatory bowel disease, spondyloarthropathies, experimental autoimmune encephalomyelitis, immune neutropenia, juvenile onset diabetes, and immune responses associated with delayed hypersensitivity mediated by cytokines, T-lymphocytes typically found in tuberculosis, sarcoidosis, and polymyositis, polyarteritis, cutaneous vasculitis, pemphigus, pemphigold, ture's syndrome, Kawasaki's disease, systemic sclerosis, anti-phospholipid syndrome, Sjogren's syndrome, graft-versus-host (GVH) disease, and immune thrombocytopenia.

[0265] A subject having a target autoimmune disease can be identified by routine medical examination, e.g., presence of antinuclear antibodies, anti-mitochondrial autoantibodies, anti-neutrophil cytoplasmic antibody, anti-phospholipid antibodies, anti-citrullinated peptide (anti-CCP), anti-rheumatoid factor, immunoglobulin A, C-reactive protein test, complement test, erythrocyte sedimentation rate (ESR) test, blood clotting profile, and protein electrophoresis/immunofixation electrophoresis, and/or genetic testings. In some embodiments, the subject to be treated by the method described herein may be a human subject with an autoimmune disease who has undergone or is subjecting to an autoimmune disease treatment, for example, immunosuppressive mediation, hormone replacement therapy, blood transfusions, anti-inflammatory medication, and/or pain medication.

[0266] A subject suspected of having any of such target disease/disorder might show one or more symptoms of the disease/disorder. A subject at risk for the disease/disorder can be a subject having one or more of the risk factors for that disease/disorder.

[0267] As used herein, “an effective amount” refers to the amount of each active agent required to confer therapeutic effect on the subject, either alone or in combination with one or more other active agents. Determination of whether an amount of the antibody achieved the therapeutic effect would be evident to one of skill in the art. Effective amounts vary, as recognized by those skilled in the art, depending on the particular condition being treated, the severity of the condition, the individual patient parameters including age, physical condition, size, gender and weight, the duration of the treatment, the nature of concurrent therapy (if any), the specific route of administration and like factors within the knowledge and expertise of the health practitioner. These factors are well known to those of ordinary skill in the art and can be addressed with no more than routine experimentation. It is generally preferred that a maximum dose of the individual components or combinations thereof be used, that is, the highest safe dose according to sound medical judgment.

[0268] Empirical considerations, such as the half-life, generally will conmultibute to the determination of the dosage. For example, antibodies that are compatible with the human immune system, such as humanized antibodies or fully human antibodies, may be used to prolong half-life of the antibody and to prevent the antibody being attacked by the host's immune system. Frequency of administration may be determined and adjusted over the course of therapy, and is generally, but not necessarily, based on treatment and/or suppression and/or amelioration and/or delay of a target disease/disorder. Alternatively, sustained continuous release formulations of an antibody may be appropriate. Various formulations and devices for achieving sustained release are known in the art.

[0269] In one example, dosages for an antibody as described herein may be determined empirically in individuals who have been given one or more administration(s) of the antibody. Individuals are given incremental dosages of the agonist. To assess efficacy of the agonist, an indicator of the disease/disorder can be followed.

[0270] Generally, for administration of any of the antibodies described herein, an initial candidate dosage can be about 2 mg/kg. For the purpose of the present disclosure, a typical daily dosage might range from about any of 0.1 μg/kg to 3 μg/kg to 30 μg/kg to 300 μg/kg to 3 mg/kg, to 30 mg/kg to 100 mg/kg or more, depending on the factors mentioned above. For repeated administrations over several days or longer, depending on the condition, the treatment is sustained until a desired suppression of symptoms occurs or until sufficient therapeutic levels are achieved to alleviate a target disease or disorder, or a symptom thereof. An exemplary dosing regimen comprises administering an initial dose of about 2 mg/kg, followed by a weekly maintenance dose of about 1 mg/kg of the antibody, or followed by a maintenance dose of about 1 mg/kg every other week. However, other dosage regimens may be useful, depending on the pattern of pharmacokinetic decay that the practitioner wishes to achieve. For example, dosing from one-four times a week is contemplated. In some embodiments, dosing ranging from about 3 μg/mg to about 2 mg/kg (such as about 3 μg/mg, about 10 μg/mg, about 30 μg/mg, about 100 μg/mg, about 300 μg/mg, about 1 mg/kg, and about 2 mg/kg) may be used. In some embodiments, dosing frequency is once every week, every 2 weeks, every 4 weeks, every 5 weeks, every 6 weeks, every 7 weeks, every 8 weeks, every 9 weeks, or every 10 weeks; or once every month, every 2 months, or every 3 months, or longer. The progress of this therapy is easily monitored by conventional techniques and assays. The dosing regimen (including the antibody used) can vary over time.

[0271] In some embodiments, for an adult patient of normal weight, doses ranging from about 0.003 to 5.00 mg/kg may be administered. In some examples, the dosage of the antibody described herein can be 10 mg/kg. The particular dosage regimen, i.e., dose, timing and repetition, will depend on the particular individual and that individual's medical history, as well as the properties of the individual agents (such as the half-life of the agent, and other considerations well known in the art).

[0272] For the purpose of the present disclosure, the appropriate dosage of an antibody as described herein will depend on the specific antibody, antibodies, and/or non-antibody peptide (or compositions thereof) employed, the type and severity of the disease/disorder, whether the antibody is administered for preventive or therapeutic purposes, previous therapy, the patient's clinical history and response to the agonist, and the discretion of the attending physician. Typically the clinician will administer an antibody, until a dosage is reached that achieves the desired result. In some embodiments, the desired result is an increase in anti-tumor immune response in the tumor microenvironment. Methods of determining whether a dosage resulted in the desired result would be evident to one of skill in the art. Administration of one or more antibodies can be continuous or intermittent, depending, for example, upon the recipient's physiological condition, whether the purpose of the administration is therapeutic or prophylactic, and other factors known to skilled practitioners. The administration of an antibody may be essentially continuous over a preselected period of time or may be in a series of spaced dose, e.g., either before, during, or after developing a target disease or disorder.

[0273] As used herein, the term “treating” refers to the application or administration of a composition including one or more active agents to a subject, who has a target disease or disorder, a symptom of the disease/disorder, or a predisposition toward the disease/disorder, with the purpose to cure, heal, alleviate, relieve, alter, remedy, ameliorate, improve, or affect the disorder, the symptom of the disease, or the predisposition toward the disease or disorder.

[0274] Alleviating a target disease/disorder includes delaying the development or progression of the disease, or reducing disease severity or prolonging survival. Alleviating the disease or prolonging survival does not necessarily require curative results. As used therein, “delaying” the development of a target disease or disorder means to defer, hinder, slow, retard, stabilize, and/or postpone progression of the disease. This delay can be of varying lengths of time, depending on the history of the disease and/or individuals being treated. A method that “delays” or alleviates the development of a disease, or delays the onset of the disease, is a method that reduces probability of developing one or more symptoms of the disease in a given time frame and/or reduces extent of the symptoms in a given time frame, when compared to not using the method. Such comparisons are typically based on clinical studies, using a number of subjects sufficient to give a statistically significant result.

[0275] “Development” or “progression” of a disease means initial manifestations and/or ensuing progression of the disease. Development of the disease can be detectable and assessed using standard clinical techniques as well known in the art. However, development also refers to progression that may be undetectable. For purpose of this disclosure, development or progression refers to the biological course of the symptoms. “Development” includes occurrence, recurrence, and onset. As used herein “onset” or “occurrence” of a target disease or disorder includes initial onset and/or recurrence.

[0276] Conventional methods, known to those of ordinary skill in the art of medicine, can be used to administer the pharmaceutical composition to the subject, depending upon the type of disease to be treated or the site of the disease. This composition can also be administered via other conventional routes, e.g., administered orally, parenterally, by inhalation spray, topically, rectally, nasally, buccally, vaginally or via an implanted reservoir. The term “parenteral” as used herein includes subcutaneous, intracutaneous, intravenous, intramuscular, intraarticular, intraarterial, intrasynovial, intrasternal, intrathecal, intralesional, and intracranial injection or infusion techniques. In addition, it can be administered to the subject via injectable depot routes of administration such as using 1-, 3-, or 6-month depot injectable or biodegradable materials and methods. In some examples, the pharmaceutical composition is administered intraocularly or intravitreally.

[0277] Injectable compositions may contain various carriers such as vegetable oils, dimethylactamide, dimethylformamide, ethyl lactate, ethyl carbonate, isopropyl myristate, ethanol, and polyols (glycerol, propylene glycol, liquid polyethylene glycol, and the like). For intravenous injection, water soluble antibodies can be administered by the drip method, whereby a pharmaceutical formulation containing the antibody and a physiologically acceptable excipient is infused. Physiologically acceptable excipients may include, for example, 5% dextrose, 0.9% saline, Ringer's solution or other suitable excipients. Intramuscular preparations, e.g., a sterile formulation of a suitable soluble salt form of the antibody, can be dissolved and administered in a pharmaceutical excipient such as Water-for-Injection, 0.9% saline, or 5% glucose solution.

[0278] In one embodiment, an antibody is administered via site-specific or targeted local delivery techniques. Examples of site-specific or targeted local delivery techniques include various implantable depot sources of the antibody or local delivery catheters, such as infusion catheters, an indwelling catheter, or a needle catheter, synthetic grafts, adventitial wraps, shunts and stents or other implantable devices, site specific carriers, direct injection, or direct application. See, e.g., PCT Publication No. WO 00/53211 and U.S. Pat. No. 5,981,568.

[0279] Targeted delivery of therapeutic compositions containing an antisense polynucleotide, expression vector, or subgenomic polynucleotides can also be used. Receptor-mediated DNA delivery techniques are described in, for example, Findeis et al., Trends Biotechnol. (1993) 11:202; Chiou et al., Gene Therapeutics: Methods and Applications Of Direct Gene Transfer (J. A. Wolff, ed.) (1994); Wu et al., J. Biol. Chem. (1988) 263:621; Wu et al., J. Biol. Chem. (1994) 269:542; Zenke et al., Proc. Natl. Acad. Sci. USA (1990) 87:3655; Wu et al., J. Biol. Chem. (1991) 266:338.

[0280] Therapeutic compositions containing a polynucleotide (e.g., those encoding the antibodies described herein) are administered in a range of about 100 ng to about 200 mg of DNA for local administration in a gene therapy protocol. In some embodiments, concentration ranges of about 500 ng to about 50 mg, about 1 μg to about 2 mg, about 5 μg to about 500 μg, and about 20 μg to about 100 μg of DNA or more can also be used during a gene therapy protocol.

[0281] The therapeutic polynucleotides and polypeptides described herein can be delivered using gene delivery vehicles. The gene delivery vehicle can be of viral or non-viral origin (see generally, Jolly, Cancer Gene Therapy (1994) 1:51; Kimura, Human Gene Therapy (1994) 5:845; Connelly, Human Gene Therapy (1995) 1:185; and Kaplitt, Nature Genetics (1994) 6:148). Expression of such coding sequences can be induced using endogenous mammalian or heterologous promoters and/or enhancers. Expression of the coding sequence can be either constitutive or regulated.

[0282] Viral-based vectors for delivery of a desired polynucleotide and expression in a desired cell are well known in the art. Exemplary viral-based vehicles include, but are not limited to, recombinant retroviruses (see, e.g., PCT Publication Nos. WO 90/07936; WO 94/03622; WO 93/25698; WO 93/25234; WO 93/11230; WO 93/10218; WO 91/02805; U.S. Pat. Nos. 5,219,740 and 4,777,127; GB Patent No. 2,200,651; and EP Patent No. 0 345 242), alphavirus-based vectors (e.g., Sindbis virus vectors, Semliki forest virus (ATCC VR-67; ATCC VR-1247), Ross River virus (ATCC VR-373; ATCC VR-1246) and Venezuelan equine encephalitis virus (ATCC VR-923; ATCC VR-1250; ATCC VR 1249; ATCC VR-532)), and adeno-associated virus (AAV) vectors (see, e.g., PCT Publication Nos. WO 94/12649, WO 93/03769; WO 93/19191; WO 94/28938; WO 95/11984 and WO 95/00655). Administration of DNA linked to killed adenovirus as described in Curiel, Hum. Gene Ther. (1992) 3:147 can also be employed.

[0283] Non-viral delivery vehicles and methods can also be employed, including, but not limited to, polycationic condensed DNA linked or unlinked to killed adenovirus alone (see, e.g., Curiel, Hum. Gene Ther. (1992) 3:147); ligand-linked DNA (see, e.g., Wu, J. Biol. Chem. (1989) 264:16985); eukaryotic cell delivery vehicles cells (see, e.g., U.S. Pat. No. 5,814,482; PCT Publication Nos. WO 95/07994; WO 96/17072; WO 95/30763; and WO 97/42338) and nucleic charge neutralization or fusion with cell membranes. Naked DNA can also be employed. Exemplary naked DNA introduction methods are described in PCT Publication No. WO 90/11092 and U.S. Pat. No. 5,580,859. Liposomes that can act as gene delivery vehicles are described in U.S. Pat. No. 5,422,120; PCT Publication Nos. WO 95/13796; WO 94/23697; WO 91/14445; and EP Patent No. 0524968. Additional approaches are described in Philip, Mol. Cell. Biol. (1994) 14:2411, and in Woffendin, Proc. Natl. Acad. Sci. (1994) 91:1581.

[0284] The particular dosage regimen, i.e., dose, timing and repetition, used in the method described herein will depend on the particular subject and that subject's medical history.

[0285] In some embodiments, more than one antibody, or a combination of an antibody and another suitable therapeutic agent, may be administered to a subject in need of the treatment. The antibody can also be used in conjunction with other agents that serve to enhance and/or complement the effectiveness of the agents. Treatment efficacy for a target disease/disorder can be assessed by methods well-known in the art.

[0286] When any of the antibodies described herein is used for treating a cancer, it can be combined with an anti-cancer therapy, for example, those known in the art. Additional anti-cancer therapy includes chemotherapy, surgery, radiation, immunotherapy, gene therapy, and so forth.

[0287] Alternatively, the treatment of the present disclosure can be combined with a chemotherapeutic agent, for example, pyrimidine analogs (5-fluorouracil, floxuridine, capecitabine, gemcitabine and cytarabine), purine analogs, folate antagonists and related inhibitors (mercaptopurine, thioguanine, pentostatin and 2-chlorodeoxyadenosine (cladribine)); antiproliferative/antimitotic agents including natural products such as vinca alkaloids (vinblastine, vincristine, and vinorelbine), microtubule disruptors such as taxane (paclitaxel, docetaxel), vincristin, vinblastin, nocodazole, epothilones and navelbine, epidipodophyllotoxins (etoposide, teniposide), DNA damaging agents (actinomycin, amsacrine, anthracyclines, bleomycin, busulfan, camptothecin, carboplatin, chlorambucil, cisplatin, cyclophosphamide, cytoxan, dactinomycin, daunorubicin, doxorubicin, epirubicin, hexamethyhnelamineoxaliplatin, iphosphamide, melphalan, merchlorehtamine, mitomycin, mitoxantrone, nitrosourea, plicamycin, procarbazine, taxol, taxotere, teniposide, multiethylenethiophosphoramide and etoposide (VP16)); antibiotics such as dactinomycin (actinomycin D), daunorubicin, doxorubicin (adriamycin), idarubicin, anthracyclines, mitoxantrone, bleomycins, plicamycin (mithramycin) and mitomycin; enzymes (L-asparaginase which systemically metabolizes L-asparagine and deprives cells which do not have the capacity to synthesize their own asparagine); antiplatelet agents; antiproliferative/antimitotic alkylating agents such as nitrogen mustards (mechlorethamine, cyclophosphamide and analogs, melphalan, chlorambucil), ethylenimines and methylmelamines (hexamethylmelamine and thiotepa), alkyl sulfonates-busulfan, nitrosoureas (carmustine (BCNU) and analogs, streptozocin), trazenes-dacarbazinine (DTIC); antiproliferative/antimitotic antimetabolites such as folic acid analogs (methotrexate); platinum coordination complexes (cisplatin, carboplatin), procarbazine, hydroxyurea, mitotane, aminoglutethimide; hormones, hormone analogs (estrogen, tamoxifen, goserelin, bicalutamide, nilutamide) and aromatase inhibitors (letrozole, anastrozole); anticoagulants (heparin, synthetic heparin salts and other inhibitors of thrombin); fibrinolytic agents (such as tissue plasminogen activator, streptokinase and urokinase), aspirin, dipyridamole, ticlopidine, clopidogrel, abciximab; antimigratory agents; antisecretory agents (breveldin); immunosuppressives (cyclosporine, tacrolimus (FK-506), sirolimus (rapamycin), azathioprine, mycophenolate mofetil); anti-angiogenic compounds (e.g., TNP-470, genistein, bevacizumab) and growth factor inhibitors (e.g., fibroblast growth factor (FGF) inhibitors); angiotensin receptor blocker; nimultic oxide donors; anti-sense oligonucleotides; antibodies (trastuzumab); cell cycle inhibitors and differentiation inducers (tretinoin); mTOR inhibitors, topoisomerase inhibitors (doxorubicin (adriamycin), amsacrine, camptothecin, daunorubicin, dactinomycin, eniposide, epirubicin, etoposide, idarubicin and mitoxantrone, topotecan, irinotecan), corticosteroids (cortisone, dexamethasone, hydrocortisone, methylpednisolone, prednisone, and prenisolone); growth factor signal transduction kinase inhibitors; mitochondrial dysfunction inducers and caspase activators; and chromatin disruptors.

[0288] When any of the antibodies described herein is for use in treating an immune disorder, it can be co-used with other immunomodulatory treatments such as, e.g., therapeutic vaccines (including but not limited to GVAX, DC-based vaccines, etc.), or checkpoint inhibitors (including but not limited to agents that block CTLA4, PD1, LAG3, TIM3, etc.). In some instances, the antibody can be combined with another therapy for autoimmune diseases.

[0289] Examples include, but are not limited to, intravenous Ig therapy; nonsteroidal anti-inflammatory drugs (NSAID); corticosteroids; cyclosporins, rapamycins, ascomycins; cyclophosphamide; azathioprene; methotrexate; brequinar; FTY 720; leflunomide; mizoribine; mycophenolic acid; mycophenolate mofetil; 15-deoxyspergualine; an immunosuppressive agent, or an adhesion molecule inhibitor.

[0290] For examples of additional useful agents see also Physician's Desk Reference, 59.sup.th edition, (2005), Thomson P D R, Montvale N.J.; Gennaro et al., Eds. Remington's The Science and Practice of Pharmacy 20.sup.th edition, (2000), Lippincott Williams and Wilkins, Baltimore Md.; Braunwald et al., Eds. Harrison's Principles of Internal Medicine, 15.sup.th edition, (2001), McGraw Hill, NY; Berkow et al., Eds. The Merck Manual of Diagnosis and Therapy, (1992), Merck Research Laboratories, Rahway N.J.

[0291] When a second therapeutic agent is used, such an agent can be administered simultaneously or sequentially (in any order) with the therapeutic agent described herein. When co-administered with an additional therapeutic agent, suitable therapeutically effective dosages for each agent may be lowered due to the additive action or synergy.

### VI. Kits Comprising Antibodies Disclosed Herein

[0292] The present disclosure also provides kits for use in treating or alleviating a target disease, such as cancer or immune disorders as described herein. Such kits can include one or more containers comprising an anti-GITR antibody, anti-B7H3/CD40 bi-specific antibody, anti-B7H3/CD137 bi-specific antibody, anti-B7H3/GITR bi-specific antibody, anti-B7H3/CD40 bi-specific antibody, and/or anti-B7H3/OX40 bi-specific antibody, e.g., any of those described herein, and optionally a second therapeutic agent to be co-used with the antibody, which is also described herein.

[0293] In some embodiments, the kit can comprise instructions for use in accordance with any of the methods described herein. The included instructions can comprise a description of administration of the antibody, and optionally the second therapeutic agent, to treat, delay the onset, or alleviate a target disease as those described herein. The kit may further comprise a description of selecting an individual suitable for treatment based on identifying whether that individual has the target disease, e.g., applying the diagnostic method as described herein. In still other embodiments, the instructions comprise a description of administering an antibody to an individual at risk of the target disease.

[0294] The instructions relating to the use of an antibody generally include information as to dosage, dosing schedule, and route of administration for the intended treatment. The containers may be unit doses, bulk packages (e.g., multi-dose packages) or sub-unit doses. Instructions supplied in the kits of the invention are typically written instructions on a label or package insert (e.g., a paper sheet included in the kit), but machine-readable instructions (e.g., instructions carried on a magnetic or optical storage disk) are also acceptable.

[0295] The label or package insert indicates that the composition is used for treating, delaying the onset and/or alleviating the disease, such as cancer or immune disorders (e.g., an autoimmune disease). Instructions may be provided for practicing any of the methods described herein.

[0296] The kits of this invention are in suitable packaging. Suitable packaging includes, but is not limited to, vials, bottles, jars, flexible packaging (e.g., sealed Mylar or plastic bags), and the like. Also contemplated are packages for use in combination with a specific device, such as an inhaler, nasal administration device (e.g., an atomizer) or an infusion device such as a minipump. A kit may have a sterile access port (for example the container may be an intravenous solution bag or a vial having a stopper pierceable by a hypodermic injection needle). The container may also have a sterile access port (for example the container may be an intravenous solution bag or a vial having a stopper pierceable by a hypodermic injection needle). At least one active agent in the composition is an antibody as those described herein.

[0297] Kits may optionally provide additional components such as buffers and interpretive information. Normally, the kit comprises a container and a label or package insert(s) on or associated with the container. In some embodiments, the invention provides articles of manufacture comprising contents of the kits described above.

### General Techniques

[0298] The practice of the present disclosure will employ, unless otherwise indicated, conventional techniques of molecular biology (including recombinant techniques), microbiology, cell biology, biochemistry, and immunology, which are within the skill of the art. Such techniques are explained fully in the literature, such as Molecular Cloning: A Laboratory Manual, second edition (Sambrook, et al., 1989) Cold Spring Harbor Press; Oligonucleotide Synthesis (M. J. Gait, ed. 1984); Methods in Molecular Biology, Humana Press; Cell Biology: A Laboratory Notebook (J. E. Cellis, ed., 1989) Academic Press; Animal Cell Culture (R. I. Freshney, ed. 1987); Introduction to Cell and Tissue Culture (J. P. Mather and P. E. Roberts, 1998) Plenum Press; Cell and Tissue Culture: Laboratory Procedures (A. Doyle, J. B. Griffiths, and D. G. Newell, eds. 1993-8) J. Wiley and Sons; Methods in Enzymology (Academic Press, Inc.); Handbook of Experimental Immunology (D. M. Weir and C. C. Blackwell, eds.): Gene Transfer Vectors for Mammalian Cells (J. M. Miller and M. P. Calos, eds., 1987); Current Protocols in Molecular Biology (F. M. Ausubel, et al. eds. 1987); PCR: The Polymerase Chain Reaction, (Mullis, et al., eds. 1994); Current Protocols in Immunology (J. E. Coligan et al., eds., 1991); Short Protocols in Molecular Biology (Wiley and Sons, 1999); Immunobiology (C. A. Janeway and P. Travers, 1997); Antibodies (P. Finch, 1997); Antibodies: a practice approach (D. Catty., ed., IRL Press, 1988-1989); Monoclonal antibodies: a practical approach (P. Shepherd and C. Dean, eds., Oxford University Press, 2000); Using antibodies: a laboratory manual (E. Harlow and D. Lane (Cold Spring Harbor Laboratory Press, 1999); The Antibodies (M. Zanetti and J. D. Capra, eds. Harwood Academic Publishers, 1995); DNA Cloning: A practical Approach, Volumes I and II (D. N. Glover ed. 1985); Nucleic Acid Hybridization (B. D. Hames & S. J. Higgins eds. (1985»; Transcription and Translation (B. D. Hames & S. J. Higgins, eds. (1984»; Animal Cell Culture (R. I. Freshney, ed. (1986»; Immobilized Cells and Enzymes (IRL Press, (1986»; and B. Perbal, A practical Guide To Molecular Cloning (1984); F. M. Ausubel et al. (eds.).

[0299] Without further elaboration, it is believed that one skilled in the art can, based on the above description, utilize the present invention to its fullest extent. The following specific embodiments are, therefore, to be construed as merely illustrative, and not limitative of the remainder of the disclosure in any way whatsoever. All publications cited herein are incorporated by reference for the purposes or subject matter referenced herein.

### Example 1: Construction of Anti-B7H3 Antibodies

[0300] Anti-human B7H3 antibodies were generated using standard murine hybridoma technology. Exemplary anti-B7H3 antibody, Ly383 and Ly387, were developed. The amino acid sequences of the V_{H} and V_{L} chains of antibody Ly383 and antibody Ly387 were analyzed and the CDRs were identified following the Kabat CDR definitions. The V_{H} and V_{L} sequences of Ly383 and Ly387 are provided in Table 2 below (with the CDR regions identified in boldface):

Humanized Anti-B7H3 Antibodies Derived from Ly383

[0301] Sequence alignments were performed to compare the Ly383 V_{H} and V_{L} to human germline V_{H} and V_{L} sequences, respectively, following methods known in the art. See, e.g., Glanville J. et al. PNAS 2009; 106 (48) 20216-21. Based on overall sequence identity, matching interface positions and similarly classed CDR canonical positions, a germline family was identified for each of the light and heavy chains as the desired acceptor frameworks, i.e., IGKV3-11*01 for the light chain and IGHV1-46*01 for the heavy chain. Human acceptors were identified, the amino acid sequences of which are shown in Table 2.

[0302] The CDRs of the parent Ly383 antibody were grafted into the corresponding CDR regions of the above-noted human V_{H} and V_{L} acceptor sequences to generate humanized Ly383_VH-1 and Ly383_VL-1 chains (grafted humanized antibody; clone Ly1426), the amino acid sequence of each of which is provided in Table 2 below (CDRs in boldface):

[0303] Homology modeling of Ly383 antibody Fv fragments was carried out as follows. Briefly, the Ly383 V_{H} and V_{L} sequences were BLAST searched against the PDB antibody database to identify a suitable template for Fv fragments and especially for building the domain interface. Structural template 2GKI (Structural and Functional Coupling of Hsp90- and Sgt1-Centred Multi-Protein Complexes) was selected, identity=72%.

[0304] Homology models were built using customized Build Homology Models protocol. Disulfide bridges were specified and linked. Loops were optimized using DOPE method. Based on the homology model of 2GKI, the V_{H} and V_{L} sequences of the Ly383 antibody were analyzed. Framework region (FR) residues that are expected to be important for the binding activity, including canonical FR residues and V_{H}-V_{L} interface residues of the antibody were identified. The framework residues in the inner core were further analyzed and 6 residues of Ly383_VH-1 (grafted Ly383_V_{H}) were identified for back mutations, including A40K, M48I, V67A, R71S, T73K and R94S. As for Ly383_VL-1 (grafted LY383_V_{L}), 4 residues of were identified for back mutations, including L46P, L47W, G66R and F71Y. The amino acid sequences of these humanized V_{H} and V_{L} chains are provided in Table 2 below (corresponding to clone Ly1562)

[0305] Recombinant full-length human IgG/kappa of humanized Ly383 antibodies were constructed. The humanized Ly383 antibodies include:
[0306] Ly1426 (including a heavy chain of VH-1/IgG1 mut and a light chain of VL-1/kappa)
[0307] Ly1562 (including a heavy chain of VH-6/IgG1 mut and a light chain of VL-6/kappa)

[0308] The whole heavy chain and light chain amino acid sequences of clones Ly1426 and Ly1562 are also provided in Table 2 below.

[0309] PTM hot spots were identified and removed based on the humanized and backmutated antibody Ly1562, amino acid sequences with PTM removal design are provided in Table 2 below (CDRs in boldface, PTM removal underlined) (clones Ly1612, Ly1614, Ly1616, and Ly1618).

Humanized Anti-B7H3 Antibodies Derived from Ly387

[0310] Sequence alignments were performed to compare the Ly387 V_{H} and V_{L} to human germline V_{H} and V_{L} sequences, respectively, following methods known in the art. See, e.g., Glanville J. et al. PNAS 2009; 106 (48) 20216-21. Based on overall sequence identity, matching interface positions and similarly classed CDR canonical positions, a germline family was identified for each of the light and heavy chains as the desired acceptor frameworks, i.e., IGKV3-11*01 for the light chain and IGHV1-2*02 for the heavy chain. Human acceptors were identified, the amino acid sequences of which are shown in Table 2 below.

[0311] The CDRs of the parent Ly387 antibody were grafted into the corresponding CDR regions of the above-noted human V_{H} and V_{L} acceptor sequences to generate humanized Ly387_VH-1 and Ly387_VL-1 chains (grafted humanized antibody), the amino acid sequence of each of which is provided in Table 2 below (CDRs in boldface).

[0312] Recombinant full human IgG/kappa of humanized Ly387 antibodies were constructed. The humanized Ly387 antibodies include:
[0313] Ly1442 (including a heavy chain of Ly387-VH-1/IgG1mut and a light chain of Ly387-VL-1/kappa),

[0314] The amino acid sequences of the whole heavy chain and light chains of Ly1442 are also provided in Table 2 below.

TABLE 2
Anti-B7H3 Antibodies

| | | | SEQ ID |
|---|---|---|---|
| Antibody Clone | | Amino acid Sequence | NO: |
| Ly383 | VH | EVQLQQSGPELVKPGASVKMSCKASGYTFTSYVMHWVKQKPGQGLEWIGYIN | 27 |
| | | PYNDGTECTDKFKGKATLTSDKSSSTAYMELSSLTSEDSAVYYCASIYYGYD | |
| | | GTYFGVWGAGTSVTVSS | |
| | H chain | EVQLQQSGPELVKPGASVKMSCKASGYTFTSYVMHWVKQKPGQGLEWIGYIN | 28 |
| | | PYNDGTECTDKFKGKATLTSDKSSSTAYMELSSLTSEDSAVYYCASIYYGYD | |
| | | GTYFGVWGAGTSVTVSSASTKGPSVFPLAPSSKSTSGGTAALGCLVKDYFPE | |
| | | PVTVSWNSGALTSGVHTFPAVLQSSGLYSLSSVVTVPSSSLGTQTYICNVNH | |
| | | KPSNTKVDKKVEPKSCDKTHTCPPCPAPELLGGPSVFLFPPKPKDTLMISRT | |
| | | PEVTCVVVDVSHEDPEVKFNWYVDGVEVHNAKTKPREEQYNSTYRVVSVLTV | |
| | | LHQDWLNGKEYKCKVSNKALPAPIEKTISKAKGQPREPQVYTLPPSREEMTK | |
| | | NQVSLTCLVKGFYPSDIAVEWESNGQPENNYKTTPPVLDSDGSFFLYSKLTV | |
| | | DKSRWQQGNVFSCSVMHEALHNHYTQKSLSLSPGK | |
| | VL | QIVLSQSPAILSTSPGEKVTMTCRASSSVSYMHWYQQKPGSSPKPWIYATSN | 29 |
| | | LASGVPARFSGSRSGTSYSLTISRVEAEDAATYYCQQWSSNTLTFGGGTKLE | |
| | | LK | |
| | L chain | QIVLSQSPAILSTSPGEKVTMTCRASSSVSYMHWYQQKPGSSPKPWIYATSN | 30 |
| | | LASGVPARFSGSRSGTSYSLTISRVEAEDAATYYCQQWSSNTLTFGGGTKLE | |
| | | LKRTVAAPSVFIFPPSDEQLKSGTASVVCLLNNFYPREAKVQWKVDNALQSG | |
| | | NSQESVTEQDSKDSTYSLSSTLTLSKADYEKHKVYACEVTHQGLSSPVTKSF | |
| | | NRGEC | |
| Ly387 | VH | QVQLQQPGAELVKPGASVKLSCKASGYTFTSYWMHWVKQRPGQGLEWIGMIH | 31 |
| | | PNSGGTNYNEKFKGKGTLTVDKSSSTAYMQLSSLTSDDSAVYYCVTSQATWE | |
| | | AYWGQGTLVTVSA | |
| | H chain | QVQLQQPGAELVKPGASVKLSCKASGYTFTSYWMHWVKQRPGQGLEWIGMIH | 32 |
| | | PNSGGTNYNEKFKGKGTLTVDKSSSTAYMQLSSLTSDDSAVYYCVTSQATWF | |
| | | AYWGQGTLVTVSAASTKGPSVFPLAPSSKSTSGGTAALGCLVKDYFPEPVTV | |
| | | SWNSGALTSGVHTFPAVLQSSGLYSLSSVVTVPSSSLGTQTYICNVNHKPSN | |
| | | TKVDKKVEPKSCDKTHTCPPCPAPELLGGPSVFLFPPKPKDTLMISRTPEVT | |
| | | CVVVDVSHEDPEVKFNWYVDGVEVHNAKTKPREEQYNSTYRVVSVLTVLHQD | |
| | | WLNGKEYKCKVSNKALPAPIEKTISKAKGQPREPQVYTLPPSREEMTKNQVS | |
| | | LTCLVKGFYPSDIAVEWESNGQPENNYKTTPPVLDSDGSFFLYSKLTVDKSR | |
| | | WQQGNVFSCSVMHEALHNHYTQKSLSLSPGK | |
| | VL | ENVLTQSPAIMSVSPGEKVTMTCRASSSVSSSYLHWYQQKSGASPKFWIYST | 33 |
| | | SNLASGVPARFSGSGSGTSYSLTISSVEAEDAATYYCQHYSGYPLTFGAGTK | |
| | | LELR | |
| | L chain | ENVLTQSPAIMSVSPGEKVTMTCRASSSVSSSYLHWYQQKSGASPKFWIYST | 34 |
| | | SNLASGVPARFSGSGSGTSYSLTISSVEAEDAATYYCQHYSGYPLTFGAGTK | |
| | | LELRRTVAAPSVFIFPPSDEQLKSGTASVVCLLNNFYPREAKVQWKVDNALQ | |
| | | SGNSQESVTEQDSKDSTYSLSSTLTLSKADYEKHKVYACEVTHQGLSSPVTK | |
| | | SFNRGEC | |
| Ly1426 | VH | QVQLVQSGAEVKKPGASVKVSCKASGYTFTSYVMHWVRQAPGQGLEWMGYIN | 35 |
| | (Ly383- | PYNDGTECTDKFKGRVTMTRDTSTSTVYMELSSLRSEDTAVYYCARIYYGYD | |
| | VH-1) | GTYFGVWGQGTLVTVSS | |
| | H chain | QVQLVQSGAEVKKPGASVKVSCKASGYTFTSYVMHWVRQAPGQGLEWMGYIN | 36 |
| | | PYNDGTECTDKFKGRVTMTRDTSTSTVYMELSSLRSEDTAVYYCARIYYGYD | |
| | | GTYFGVWGQGTLVTVSSASTKGPSVFPLAPSSKSTSGGTAALGCLVKDYFPE | |
| | | PVTVSWNSGALTSGVHTFPAVLQSSGLYSLSSVVTVPSSSLGTQTYICNVNH | |
| | | KPSNTKVDKKVEPKSCDKTHTCPPCPAPELLGGPSVFLFPPKPKDTLMISRT | |
| | | PEVTCVVVDVSHEDPEVKFNWYVDGVEVHNAKTKPREEQYNSTYRVVSVLTV | |
| | | LHQDWLNGKEYKCKVSNKALPAPIEKTISKAKGQPREPQVYTLPPSREEMTK | |
| | | NQVSLTCLVKGFYPSDIAVEWESNGQPENNYKTTPPVLDSDGSFFLYSKLTV | |
| | | DKSRWQQGNVFSCSVMHEALHNHYTQKSLSLSPGK | |
| | VL | EIVLTQSPATLSLSPGERATLSCRASSSVSYMHWYQQKPGQAPRLLIYATSN | 37 |
| | (Ly383- | LASGIPARFSGSGSGTDFTLTISSLEPEDFAVYYCQQWSSNTLTFGGGTKVE | |
| | VL-1) | IK | |
| | L chain | EIVLTQSPATLSLSPGERATLSCRASSSVSYMHWYQQKPGQAPRLLIYATSN | 38 |
| | | LASGIPARFSGSGSGTDFTLTISSLEPEDFAVYYCQQWSSNTLTFGGGTKVE | |
| | | IKRTVAAPSVFIFPPSDEQLKSGTASVVCLLNNFYPREAKVQWKVDNALQSG | |
| | | NSQESVTEQDSKDSTYSLSSTLTLSKADYEKHKVYACEVTHQGLSSPVTKSF | |
| | | NRGEC | |
| Ly1562 | VH | QVQLVQSGAEVKKPGASVKVSCKASGYTFTSYVMHWVRQKPGQGLEWIGYIN | 39 |
| | (Ly383- | PYNDGTECTDKFKGRATMTSDKSTSTVYMELSSLRSEDTAVYYCASIYYGYD | |
| | VH-6) | GTYFGVWGQGTLVTVSS | |
| | H chain | QVQLVQSGAEVKKPGASVKVSCKASGYTFTSYVMHWVRQKPGQGLEWIGYIN | 40 |
| | | PYNDGTECTDKFKGRATMTSDKSTSTVYMELSSLRSEDTAVYYCASIYYGYD | |
| | | GTYFGVWGQGTLVTVSSASTKGPSVFPLAPSSKSTSGGTAALGCLVKDYFPE | |
| | | PVTVSWNSGALTSGVHTFPAVLQSSGLYSLSSVVTVPSSSLGTQTYICNVNH | |
| | | KPSNTKVDKKVEPKSCDKTHTCPPCPAPELLGGPSVFLFPPKPKDTLMISRT | |
| | | PEVTCVVVDVSHEDPEVKFNWYVDGVEVHNAKTKPREEQYNSTYRVVSVLTV | |
| | | LHQDWLNGKEYKCKVSNKALPAPIEKTISKAKGQPREPQVYTLPPSREEMTK | |
| | | NQVSLTCLVKGFYPSDIAVEWESNGQPENNYKTTPPVLDSDGSFFLYSKLTV | |
| | | DKSRWQQGNVFSCSVMHEALHNHYTQKSLSLSPGK | |
| | VL | EIVLTQSPATLSLSPGERATLSCRASSSVSYMHWYQQKPGQAPRPWIYATSN | 41 |
| | (Ly383- | LASGIPARFSGSRSGTDYTLTISSLEPEDFAVYYCQQWSSNTLTFGGGTKVE | |
| | VL-6) | IK | |
| | L chain | EIVLTQSPATLSLSPGERATLSCRASSSVSYMHWYQQKPGQAPRPWIYATSN | 42 |
| | | LASGIPARFSGSRSGTDYTLTISSLEPEDFAVYYCQQWSSNTLTFGGGTKVE | |
| | | IKRTVAAPSVFIFPPSDEQLKSGTASVVCLLNNFYPREAKVQWKVDNALQSG | |
| | | NSQESVTEQDSKDSTYSLSSTLTLSKADYEKHKVYACEVTHQGLSSPVTKSF | |
| | | NRGEC | |
| Ly1442 | VH | QVQLVQSGAEVKKPGASVKVSCKASGYTFTSYWMHWVRQAPGQGLEWMGMIH | 43 |
| | (Ly387- | PNSGGTNYNEKFKGRVTMTRDTSISTAYMELSRLRSDDTAVYYCARSQATWF | |
| | VH-1) | AYWGQGTLVTVSS | |
| | H chain | QVQLVQSGAEVKKPGASVKVSCKASGYTFTSYWMHWVRQAPGQGLEWMGMIH | 44 |
| | | PNSGGTNYNEKFKGRVTMTRDTSISTAYMELSRLRSDDTAVYYCARSQATWF | |
| | | AYWGQGTLVTVSSASTKGPSVFPLAPSSKSTSGGTAALGCLVKDYFPEPVTV | |
| | | SWNSGALTSGVHTFPAVLQSSGLYSLSSVVTVPSSSLGTQTYICNVNHKPSN | |
| | | TKVDKKVEPKSCDKTHTCPPCPAPELLGGPSVFLFPPKPKDTLMISRTPEVT | |
| | | CVVVDVSHEDPEVKFNWYVDGVEVHNAKTKPREEQYNSTYRVVSVLTVLHQD | |
| | | WLNGKEYKCKVSNKALPAPIEKTISKAKGQPREPQVYTLPPSREEMTKNQVS | |
| | | LTCLVKGFYPSDIAVEWESNGQPENNYKTTPPVLDSDGSFFLYSKLTVDKSR | |
| | | WQQGNVFSCSVMHEALHNHYTQKSLSLSPGK | |
| | VL | EIVLTQSPATLSLSPGERATLSCRASSSVSSSYLHWYQQKPGQAPRLLIYST | 45 |
| | (Ly387- | SNLASGIPARFSGSGSGTDFTLTISSLEPEDFAVYYCQHYSGYPLTFGGGTK | |
| | VL-1) | VEIK | |
| | L chain | EIVLTQSPATLSLSPGERATLSCRASSSVSSSYLHWYQQKPGQAPRLLIYST | 46 |
| | | SNLASGIPARFSGSGSGTDFTLTISSLEPEDFAVYYCQHYSGYPLTFGGGTK | |
| | | VEIKRTVAAPSVFIFPPSDEQLKSGTASVVCLLNNFYPREAKVQWKVDNALQ | |
| | | SGNSQESVTEQDSKDSTYSLSSTLTLSKADYEKHKVYACEVTHQGLSSPVTK | |
| | | SFNRGEC | |
| Ly1612 | VH | QVQLVQSGAEVKKPGASVKVSCKASGYTFTSYVMHWVRQKPGQGLEWIGYIN | 47 |
| | (Ly383-VH- | PYNEGTESTDKFKGRATMTSDKSTSTVYMELSSLRSEDTAVYYCASIYYGYE | |
| | 6_fix-6) | GTYFGVWGQGTLVTVSS | |
| | H chain | QVQLVQSGAEVKKPGASVKVSCKASGYTFTSYVMHWVRQKPGQGLEWIGYIN | 48 |
| | | PYNEGTESTDKFKGRATMTSDKSTSTVYMELSSLRSEDTAVYYCASIYYGYE | |
| | | GTYFGVWGQGTLVTVSSASTKGPSVFPLAPSSKSTSGGTAALGCLVKDYFPE | |
| | | PVTVSWNSGALTSGVHTFPAVLQSSGLYSLSSVVTVPSSSLGTQTYICNVNH | |
| | | KPSNTKVDKKVEPKSCDKTHTCPPCPAPELLGGPSVFLFPPKPKDTLMISRT | |
| | | PEVTCVVVDVSHEDPEVKFNWYVDGVEVHNAKTKPREEQYNSTYRVVSVLTV | |
| | | LHQDWLNGKEYKCKVSNKALPAPIEKTISKAKGQPREPQVYTLPPSREEMTK | |
| | | NQVSLTCLVKGFYPSDIAVEWESNGQPENNYKTTPPVLDSDGSFFLYSKLTV | |
| | | DKSRWQQGNVFSCSVMHEALHNHYTQKSLSLSPGK | |
| | VL | Same Ly383-VL-6 | 41 |
| | L chain | Same as light chain of Ly1562 | 42 |
| Ly1614 | VH | QVQLVQSGAEVKKPGASVKVSCKASGYTFTSYVMHWVRQKPGQGLEWIGYIN | 49 |
| | (Ly383- | PYNEGTESTDKFKGRATMTSDKSTSTVYMELSSLRSEDTAVYYCASIYYGYD | |
| | VH- | ATYFGVWGQGTLVTVSS | |
| | 6_fix-7) | | |
| | H chain | QVQLVQSGAEVKKPGASVKVSCKASGYTFTSYVMHWVRQKPGQGLEWIGYIN | 50 |
| | | PYNEGTESTDKFKGRATMTSDKSTSTVYMELSSLRSEDTAVYYCASIYYGYD | |
| | | ATYFGVWGQGTLVTVSSASTKGPSVFPLAPSSKSTSGGTAALGCLVKDYFPE | |
| | | PVTVSWNSGALTSGVHTFPAVLQSSGLYSLSSVVTVPSSSLGTQTYICNVNH | |
| | | KPSNTKVDKKVEPKSCDKTHTCPPCPAPELLGGPSVFLFPPKPKDTLMISRT | |
| | | PEVTCVVVDVSHEDPEVKFNWYVDGVEVHNAKTKPREEQYNSTYRVVSVLTV | |
| | | LHQDWLNGKEYKCKVSNKALPAPIEKTISKAKGQPREPQVYTLPPSREEMTK | |
| | | NQVSLTCLVKGFYPSDIAVEWESNGQPENNYKTTPPVLDSDGSFFLYSKLTV | |
| | | DKSRWQQGNVFSCSVMHEALHNHYTQKSLSLSPGK | |
| | VL | Same as Ly383-VL-6 | 41 |
| | L chain | Same as light chain of Ly1562 | 42 |
| Ly1616 | VH | QVQLVQSGAEVKKPGASVKVSCKASGYTFTSYVMHWVRQKPGQGLEWIGYIN | 51 |
| | (Ly383- | PYNDATESTDKFKGRATMTSDKSTSTVYMELSSLRSEDTAVYYCASIYYGYE | |
| | VH- | GTYFGVWGQGTLVTVSS | |
| | 6_fix-8) | | |
| | H chain | QVQLVQSGAEVKKPGASVKVSCKASGYTFTSYVMHWVRQKPGQGLEWIGYIN | 52 |
| | | PYNDATESTDKFKGRATMTSDKSTSTVYMELSSLRSEDTAVYYCASIYYGYE | |
| | | GTYFGVWGQGTLVTVSSASTKGPSVFPLAPSSKSTSGGTAALGCLVKDYFPE | |
| | | PVTVSWNSGALTSGVHTFPAVLQSSGLYSLSSVVTVPSSSLGTQTYICNVNH | |
| | | KPSNTKVDKKVEPKSCDKTHTCPPCPAPELLGGPSVFLFPPKPKDTLMISRT | |
| | | PEVTCVVVDVSHEDPEVKFNWYVDGVEVHNAKTKPREEQYNSTYRVVSVLTV | |
| | | LHQDWLNGKEYKCKVSNKALPAPIEKTISKAKGQPREPQVYTLPPSREEMTK | |
| | | NQVSLTCLVKGFYPSDIAVEWESNGQPENNYKTTPPVLDSDGSFFLYSKLTV | |
| | | DKSRWQQGNVFSCSVMHEALHNHYTQKSLSLSPGK | |
| | VL | Same as Ly383-VL-6 | 41 |
| | L chain | Same as light chain of Ly1562 | 42 |
| Ly1618 | VH | QVQLVQSGAEVKKPGASVKVSCKASGYTFTSYVMHWVRQKPGQGLEWIGYIN | 53 |
| | (Ly383- | PYNDATESTDKFKGRATMTSDKSTSTVYMELSSLRSEDTAVYYCASIYYGYD | |
| | VH- | ATYFGVWGQGTLVTVSS | |
| | 6_fix-9) | | |
| | H chain | QVQLVQSGAEVKKPGASVKVSCKASGYTFTSYVMHWVRQKPGQGLEWIGYIN | 54 |
| | | PYNDATESTDKFKGRATMTSDKSTSTVYMELSSLRSEDTAVYYCASIYYGYD | |
| | | ATYFGVWGQGTLVTVSSASTKGPSVFPLAPSSKSTSGGTAALGCLVKDYFPE | |
| | | PVTVSWNSGALTSGVHTFPAVLQSSGLYSLSSVVTVPSSSLGTQTYICNVNH | |
| | | KPSNTKVDKKVEPKSCDKTHTCPPCPAPELLGGPSVFLFPPKPKDTLMISRT | |
| | | PEVTCVVVDVSHEDPEVKFNWYVDGVEVHNAKTKPREEQYNSTYRVVSVLTV | |
| | | LHQDWLNGKEYKCKVSNKALPAPIEKTISKAKGQPREPQVYTLPPSREEMTK | |
| | | NQVSLTCLVKGFYPSDIAVEWESNGQPENNYKTTPPVLDSDGSFFLYSKLTV | |
| | | DKSRWQQGNVF SCSVMHEALHNHYTQKSLSLSPGK | |
| | VL | Same as Ly383-VL-6 | 41 |
| | L chain | Same as light chain of Ly1562 | 42 |
| Human | VH | QVQLVQSGAEVKKPGASVKVSCKASGYTFTSYYMHWVRQAPGQGLEWMGIIN | 55 |
| Acceptor | | PSGGSTSYAQKFQGRVTMTRDTSTSTVYMELSSLRSEDTAVYYCARIYYGYD | |
| for | | GTYFGVWGQGTLVTVSS | |
| Ly383 | VL | EIVLTQSPATLSLSPGERATLSCRASQSVSSYLAWYQQKPGQAPRLLIYDAS | 56 |
| | | NRATGIPARFSGSGSGTDFTLTISSLEPEDFAVYYCQQWSSNTLTFGGGTKV | |
| | | EIK | |
| Human | VH | QVQLVQSGAEVKKPGASVKVSCKASGYTFTGYYMHWVRQAPGQGLEWMGWIN | 57 |
| Acceptor | | PNSGGTNYAQKFQGRVTMTRDTSISTAYMELSRLRSDDTAVYYCARSQATWE | |
| for | | AYWGQGTLVTVSS | |
| Ly387 | VL | EIVLTQSPATLSLSPGERATLSCRASQSVSSYLAWYQQKPGQAPRLLIYDAS | 58 |
| | | NRATGIPARFSGSGSGTDFTLTISSLEPEDFAVYYCQHYSGYPLTFGGGTKV | |
| | | EIK | |

### Example 2: Characterization of Anti-B7H3 Antibodies

### (a) Binding Activity to Cell Surface B7H3

[0315] FACS analysis was performed to evaluate the binding properties of exemplary anti-B7H3 humanized antibodies. Briefly, CHO cells over-expressing human B7H3 were harvested using trypsin-EDTA partial digestion followed by centrifugation at 1000 g for 3 minutes. The cells were re-suspended in cold PBS-BSA (2%) at 2×10⁶/mL and aliquoted to 100 μL/tube. The anti-B7H3 humanized antibodies were serially diluted in PBS-BSA and 50 μL of each was added to the CHO-B7H3 cells. The cell were mixed and incubated at 4° C. in the dark for 2 hours, then washed with PBS-BSA twice. Secondary antibody conjugates (goat F(ab′)₂ anti-human IgG-Fc (PE), pre-adsorbed, Abcam #ab98596) at 1/500 dilution, 100 μL/well, was used to resuspend the cells. The cells were incubated 4° C. in dark for another 1 hour and washed twice with PBS-BSA, followed by fixation in 2% PFA/PBS, and then subjected to FACS analysis.

[0316] Binding of the antibodies to human B7H3 expressing CHO cells were evaluated and the mean fluorescence intensity is plotted in histograms as shown in FIGS. 1A-1C. Both Ly1562 (with back mutation) and Ly1442 (CDR grafted), humanized antibodies of the anti-B7H3 antibody Ly383 and Ly387 showed similar binding activity to the cellular B7H3 as parental chimeric antibody Ly383 and Ly387. However, Ly1426 (CDR grafted, without back mutation) didn't bind to cellular B7H3. As shown in FIG. 1D, antibodies with PTM removal design derived from Ly1562 showed similar binding activity as parent chimeric (Ly383) and humanized antibody (Ly1562).

### (b) Other Activities for B7H3

[0317] These humanized anti-B7H3 antibodies are evaluated for their in vitro and in vivo activity.

### Example 3: Anti-B7H3/CD40 Bi-Specific Antibodies

[0318] Anti-B7H3/CD40 bi-specific antibodies were produced using the anti-CD40 agonist antibody CD40 Ab1 (Ly253-G2) and anti-B7H3 antibodies B7H3 Ab1 (Ly1612) and B7H3 Ab2 (Ly1442). The amino acid sequences of the V_{H} and the V_{L} of the parent clones are provided in Table 1 above. The heavy chain and light chain complementary determining regions determined by the Kabat scheme are in boldface.

[0319] cDNAs encoding the V_{H} and V_{L} chains of those anti-CD40 and anti-7H3 antibodies (sequences provided above) were used as the starting materials for constructing anti-B7H3/CD40 bispecific antibodies. CHO-cell transient expression was carried out with am plasmids configured for expressing polypeptide chains of the bi-specific antibodies. These antibodies were purified by protein A affinity chromatography.

[0320] The amino acid sequences of the polypeptides of the bi-specific antibodies are provided I Table 3 below.

TABLE 3
Exemplary Bispecific Antibodies to B7H3 and CD40

| | | | SED ID |
|---|---|---|---|
| Antibody Clones | | Amino acid sequence | NO: |
| Ly1579 | 1^{st} | QVQLVQSGAEVKKPGASVKVSCKASGYTFTSYWMHWVRQAPGQGLEWMG | 59 |
| | chain | MIHPNSGGTNYNEKFKGRVTMTRDTSISTAYMELSRLRSDDTAVYYCAR | |
| | | SQATWFAYWGQGTLVTVSSASTKGPSVFPLAPSSKSTSGGTAALGCLVK | |
| | | DYFPEPVTVSWNSGALTSGVHTFPAVLQSSGLYSLSSVVTVPSSSLGTQ | |
| | | TYICNVNHKPSNTKVDKKVEPKSCDKTHTCPPCPAPELLGPSVFLFPPK | |
| | | PKDTLMISRTPEVTCVVVDVSHEDPEVKFNWYVDGVEVHNAKTKPREEQ | |
| | | YNSTYRVVSVLTVLHQDWLNGKEYKCKVSNKALPAPIEKTISKAKGQPR | |
| | | EPQVYTLPPSREEMTKNQVSLTCLVKGFYPSDIAVEWESNGQPENNYKT | |
| | | TPPVLDSDGSFFLYSKLTVDKSRWQQGNVFSCSVMHEALHNHYTQKSLS | |
| | | LSPGGGGGSGGGGSGGGGSGGGGSDIQMTQSPSSVSASVGDRVTITCRA | |
| | | SQGIYSWLAWYQQKPGKAPNLLIYTASTLQSGVPSRFSGSGSGTDFTLT | |
| | | ISSLQPEDFATYYCQQANIFPLTFGGGTKVEIKGGGGSGGGGSGGGGSG | |
| | | GGGSQVQLVQSGAEVKKPGASVKVSCKASGYTFTGYYMHWVRQAPGQGL | |
| | | EWMGWINPDSGGTNYAQKFQGRVTMTRDTSISTAYMELNRLRSDDTAVY | |
| | | YCARDQPLGYCTNGVCSYFDYWGQGTLVTVSS | |
| | 2^{nd} | EIVLTQSPATLSLSPGERATLSCRASSSVSSSYLHWYQQKPGQAPRLLI | 60 |
| | chain | YSTSNLASGIPARFSGSGSGTDFTLTISSLEPEDFAVYYCQHYSGYPLT | |
| | | FGGGTKVEIKRTVAAPSVFIFPPSDEQLKSGTASVVCLLNNFYPREAKV | |
| | | QWKVDNALQSGNSQESVTEQDSKDSTYSLSSTLTLSKADYEKHKVYACE | |
| | | VTHQGLSSPVTKSFNRGEC | |
| Ly1581 | 1^{st} | QVQLVQSGAEVKKPGASVKVSCKASGYTFTSYVMHWVRQKPGQGLEWIG | 61 |
| | chain | YINPYNEGTESTDKFKGRATMTSDKSTSTVYMELSSLRSEDTAVYYCAS | |
| | | IYYGYEGTYFGVWGQGTLVTVSSASTKGPSVFPLAPSSKSTSGGTAALG | |
| | | CLVKDYFPEPVTVSWNSGALTSGVHTFPAVLQSSGLYSLSSVVTVPSSS | |
| | | LGTQTYICNVNHKPSNTKVDKKVEPKSCDKTHTCPPCPAPELLGPSVFL | |
| | | FPPKPKDTLMISRTPEVTCVVVDVSHEDPEVKFNWYVDGVEVHNAKTKP | |
| | | REEQYNSTYRVVSVLTVLHQDWLNGKEYKCKVSNKALPAPIEKTISKAK | |
| | | GQPREPQVYTLPPSREEMTKNQVSLTCLVKGFYPSDIAVEWESNGQPEN | |
| | | NYKTTPPVLDSDGSFFLYSKLTVDKSRWQQGNVFSCSVMHEALHNHYTQ | |
| | | KSLSLSPGGGGGSGGGGSGGGGSGGGGSDIQMTQSPSSVSASVGDRVTI | |
| | | TCRASQGIYSWLAWYQQKPGKAPNLLIYTASTLQSGVPSRFSGSGSGTD | |
| | | FTLTISSLQPEDFATYYCQQANIFPLTFGGGTKVEIKGGGGSGGGGSGG | |
| | | GGSGGGGSQVQLVQSGAEVKKPGASVKVSCKASGYTFTGYYMHWVRQAP | |
| | | GQGLEWMGWINPDSGGTNYAQKFQGRVTMTRDTSISTAYMELNRLRSDD | |
| | | TAVYYCARDQPLGYCTNGVCSYFDYWGQGTLVTVSS | |
| | 2^{nd} | EIVLTQSPATLSLSPGERATLSCRASSSVSYMHWYQQKPGQAPRPWIYA | 62 |
| | chain | TSNLASGIPARFSGSRSGTDYTLTISSLEPEDFAVYYCQQWSSNTLTFG | |
| | | GGTKVEIKRTVAAPSVFIFPPSDEQLKSGTASVVCLLNNFYPREAKVQW | |
| | | KVDNALQSGNSQESVTEQDSKDSTYSLSSTLTLSKADYEKHKVYACEVT | |
| | | HQGLSSPVTKSFNRGEC | |
| Ly1663 | 1^{st} | QVQLVQSGAEVKKPGASVKVSCKASGYTFTSYVMHWVRQKPGQGLEWIG | 63 |
| | chain | YINPYNEGTESTDKFKGRATMTSDKSTSTVYMELSSLRSEDTAVYYCAS | |
| | | IYYGYEGTYFGVWGQGTLVTVSSASTKGPSVFPLAPSSKSTSGGTAALG | |
| | | CLVKDYFPEPVTVSWNSGALTSGVHTFPAVLQSSGLYSLSSVVTVPSSS | |
| | | LGTQTYICNVNHKPSNTKVDKKVEPKSCDKTHTCPPCPAPELLGPSVFL | |
| | | FPPKPKDTLMISRTPEVTCVVVDVSHEDPEVKFNWYVDGVEVHNAKTKP | |
| | | REEQYNSTYRVVSVLTVLHQDWLNGKEYKCKVSNKALPAPIEKTISKAK | |
| | | GQPREPQVYTLPPSREEMTKNQVSLTCLVKGFYPSDIAVEWESNGQPEN | |
| | | NYKTTPPVLDSDGSFFLYSKLTVDKSRWQQGNVFSCSVMHEALHNHYTQ | |
| | | KSLSLSPGK | |
| | 2^{nd} | EIVLTQSPATLSLSPGERATLSCRASSSVSYMHWYQQKPGQAPRPWIYA | 64 |
| | chain | TSNLASGIPARFSGSRSGTDYTLTISSLEPEDFAVYYCQQWSSNTLTFG | |
| | | GGTKVEIKRTVAAPSVFIFPPSDEQLKSGTASVVCLLNNFYPREAKVQW | |
| | | KVDNALQSGNSQESVTEQDSKDSTYSLSSTLTLSKADYEKHKVYACEVT | |
| | | HQGLSSPVTKSFNRGECGGGGSGGGGSGGGGSGGGGSDIQMTQSPSSVS | |
| | | ASVGDRVTITCRASQGIYSWLAWYQQKPGKAPNLLIYTASTLQSGVPSR | |
| | | FSGSGSGTDFTLTISSLQPEDFATYYCQQANIFPLTFGGGTKVEIKGGG | |
| | | GSGGGGSGGGGSGGGGSQVQLVQSGAEVKKPGASVKVSCKASGYTFTGY | |
| | | YMHWVRQAPGQGLEWMGWINPDSGGTNYAQKFQGRVTMTRDTSISTAYM | |
| | | ELNRLRSDDTAVYYCARDQPLGYCTNGVCSYFDYWGQGTLVTVSS | |
| Ly1662 | 1^{st} | DIQMTQSPSSVSASVGDRVTITCRASQGIYSWLAWYQQKPGKAPNLLIY | 65 |
| | chain | TASTLQSGVPSRFSGSGSGTDFTLTISSLQPEDFATYYCQQANIFPLTF | |
| | | GGGTKVEIKGGGGSGGGGSGGGGSGGGGSQVQLVQSGAEVKKPGASVKV | |
| | | SCKASGYTFTGYYMHWVRQAPGQGLEWMGWINPDSGGTNYAQKFQGRVT | |
| | | MTRDTSISTAYMELNRLRSDDTAVYYCARDQPLGYCTNGVCSYFDYWGQ | |
| | | GTLVTVSSGGGGSGGGGSGGGGSGGGGSQVQLVQSGAEVKKPGASVKVS | |
| | | CKASGYTFTSYVMHWVRQKPGQGLEWIGYINPYNEGTESTDKFKGRATM | |
| | | TSDKSTSTVYMELSSLRSEDTAVYYCASIYYGYEGTYFGVWGQGTLVTV | |
| | | SSASTKGPSVFPLAPSSKSTSGGTAALGCLVKDYFPEPVTVSWNSGALT | |
| | | SGVHTFPAVLQSSGLYSLSSVVTVPSSSLGTQTYICNVNHKPSNTKVDK | |
| | | KVEPKSCDKTHTCPPCPAPELLGPSVFLFPPKPKDTLMISRTPEVTCVV | |
| | | VDVSHEDPEVKFNWYVDGVEVHNAKTKPREEQYNSTYRVVSVLTVLHQD | |
| | | WLNGKEYKCKVSNKALPAPIEKTISKAKGQPREPQVYTLPPSREEMTKN | |
| | | QVSLTCLVKGFYPSDIAVEWESNGQPENNYKTTPPVLDSDGSFFLYSKL | |
| | | TVDKSRWQQGNVFSCSVMHEALHNHYTQKSLSLSPGK | |
| | 2^{nd} | EIVLTQSPATLSLSPGERATLSCRASSSVSYMHWYQQKPGQAPRPWIYA | 66 |
| | chain | TSNLASGIPARFSGSRSGTDYTLTISSLEPEDFAVYYCQQWSSNTLTFG | |
| | | GGTKVEIKRTVAAPSVFIFPPSDEQLKSGTASVVCLLNNFYPREAKVQW | |
| | | KVDNALQSGNSQESVTEQDSKDSTYSLSSTLTLSKADYEKHKVYACEVT | |
| | | HQGLSSPVTKSFNRGEC | |
| Ly1660 | 1^{st} | QVQLVQSGAEVKKPGASVKVSCKASGYTFTSYVMHWVRQKPGQGLEWIG | 67 |
| | chain | YINPYNEGTESTDKFKGRATMTSDKSTSTVYMELSSLRSEDTAVYYCAS | |
| | | IYYGYEGTYFGVWGQGTLVTVSSASTKGPSVFPLAPSSKSTSGGTAALG | |
| | | CLVKDYFPEPVTVSWNSGALTSGVHTFPAVLQSSGLYSLSSVVTVPSSS | |
| | | LGTQTYICNVNHKPSNTKVDKKVEPKSCDKTHTCPPCPAPELLGPSVFL | |
| | | FPPKPKDTLMISRTPEVTCVVVDVSHEDPEVKFNWYVDGVEVHNAKTKP | |
| | | REEQYNSTYRVVSVLTVLHQDWLNGKEYKCKVSNKALPAPIEKTISKAK | |
| | | GQPREPQVYTLPPCREEMTKNQVSLWCLVKGFYPSDIAVEWESNGQPEN | |
| | | NYKTTPPVLDSDGSFFLYSKLTVDKSRWQQGNVFSCSVMHEALHNHYTQ | |
| | | KSLSLSPGK | |
| | 2^{nd} | QVQLVQSGAEVKKPGASVKVSCKASGYTFTGYYMHWVRQAPGQGLEWMG | 68 |
| | chain | WINPDSGGTNYAQKFQGRVTMTRDTSISTAYMELNRLRSDDTAVYYCAR | |
| | | DQPLGYCTNGVCSYFDYWGQGTLVTVSSASVAAPSVFIFPPSDEQLKSG | |
| | | TASVVCLLNNFYPREAKVQWKVDNALQSGNSQESVTEQDSKDSTYSLSS | |
| | | TLTLSKADYEKHKVYACEVTHQGLSSPVTKSFNRGECDKTHTCPPCPAP | |
| | | ELLGPSVFLFPPKPKDTLMISRTPEVTCVVVDVSHEDPEVKFNWYVDGV | |
| | | EVHNAKTKPREEQYNSTYRVVSVLTVLHQDWLNGKEYKCKVSNKALPAP | |
| | | IEKTISKAKGQPREPQVCTLPPSREEMTKNQVSLSCAVKGFYPSDIAVE | |
| | | WESNGQPENNYKTTPPVLDSDGSFFLVSKLTVDKSRWQQGNVFSCSVMH | |
| | | EALHNRFTQKSLSLSPGK | |
| | 3^{rd} | EIVLTQSPATLSLSPGERATLSCRASSSVSYMHWYQQKPGQAPRPWIYA | 69 |
| | chain | TSNLASGIPARFSGSRSGTDYTLTISSLEPEDFAVYYCQQWSSNTLTFG | |
| | | GGTKVEIKRTVAAPSVFIFPPSDEQLKSGTASVVCLLNNFYPREAKVQW | |
| | | KVDNALQSGNSQESVTEQDSKDSTYSLSSTLTLSKADYEKHKVYACEVT | |
| | | HQGLSSPVTKSFNRGEC | |
| | 4^{th} | DIQMTQSPSSVSASVGDRVTITCRASQGIYSWLAWYQQKPGKAPNLLIY | 70 |
| | chain | TASTLQSGVPSRFSGSGSGTDFTLTISSLQPEDFATYYCQQANIFPLTF | |
| | | GGGTKVEIKSSASTKGPSVFPLAPSSKSTSGGTAALGCLVKDYFPEPVT | |
| | | VSWNSGALTSGVHTFPAVLQSSGLYSLSSVVTVPSSSLGTQTYICNVNH | |
| | | KPSNTKVDKKVEPKSC | |
| Ly1661 | 1^{st} | QVQLVQSGAEVKKPGASVKVSCKASGYTFTSYVMHWVRQKPGQGLEWIG | 71 |
| | chain | YINPYNEGTESTDKFKGRATMTSDKSTSTVYMELSSLRSEDTAVYYCAS | |
| | | IYYGYEGTYFGVWGQGTLVTVSSASTKGPSVFPLAPSSKSTSGGTAALG | |
| | | CLVKDYFPEPVTVSWNSGALTSGVHTFPAVLQSSGLYSLSSVVTVPSSS | |
| | | LGTQTYICNVNHKPSNTKVDKKVEPKSCDKTHTCPPCPAPELLGPSVFL | |
| | | FPPKPKDTLMISRTPEVTCVVVDVSHEDPEVKFNWYVDGVEVHNAKTKP | |
| | | REEQYNSTYRVVSVLTVLHQDWLNGKEYKCKVSNKALPAPIEKTISKAK | |
| | | GQPREPQVYTDPPSREEMTKNQVSLTCEVKGFYPSDIAVEWESNGQPEN | |
| | | NYKTTPPVLDSDGSFFLYSKLTVDKSRWQQGNVFSCSVMHEALHNHYTQ | |
| | | KSLSLSPGK | |
| | 2^{nd} | QVQLVQSGAEVKKPGASVKVSCKASGYTFTGYYMHWVRQAPGQGLEWMG | 72 |
| | chain | WINPDSGGTNYAQKFQGRVTMTRDTSISTAYMELNRLRSDDTAVYYCAR | |
| | | DQPLGYCTNGVCSYFDYWGQGTLVTVSSASVAAPSVFIFPPSDEQLKSG | |
| | | TASVVCLLNNFYPREAKVQWKVDNALQSGNSQESVTEQDSKDSTYSLSS | |
| | | TLTLSKADYEKHKVYACEVTHQGLSSPVTKSFNRGECDKTHTCPPCPAP | |
| | | ELLGPSVFLFPPKPKDTLMISRTPEVTCVVVDVSHEDPEVKFNWYVDGV | |
| | | EVHNAKTKPREEQYNSTYRVVSVLTVLHQDWLNGKEYKCKVSNKALPAP | |
| | | IEKTISKAKGQPREPQVYTKPPSREEMTKNQVSLTCKVKGFYPSDIAVE | |
| | | WESNGQPENNYKTTPPVLDSDGSFFLYSKLTVDKSRWQQGNVFSCSVMH | |
| | | EALHNRFTQKSLSLSPGK | |
| | 3^{rd} | EIVLTQSPATLSLSPGERATLSCRASSSVSYMHWYQQKPGQAPRPWIYA | 73 |
| | chain | TSNLASGIPARFSGSRSGTDYTLTISSLEPEDFAVYYCQQWSSNTLTFG | |
| | | GGTKVEIKRTVAAPSVFIFPPSDEQLKSGTASVVCLLNNFYPREAKVQW | |
| | | KVDNALQSGNSQESVTEQDSKDSTYSLSSTLTLSKADYEKHKVYACEVT | |
| | | HQGLSSPVTKSFNRGEC | |
| | 4^{th} | DIQMTQSPSSVSASVGDRVTITCRASQGIYSWLAWYQQKPGKAPNLLIY | 74 |
| | chain | TASTLQSGVPSRFSGSGSGTDFTLTISSLQPEDFATYYCQQANIFPLTF | |
| | | GGGTKVEIKSSASTKGPSVFPLAPSSKSTSGGTAALGCLVKDYFPEPVT | |
| | | VSWNSGALTSGVHTFPAVLQSSGLYSLSSVVTVPSSSLGTQTYICNVNH | |
| | | KPSNTKVDKKVEPKSC | |
| Ly1679 | 1^{st} | QVQLVQSGAEVKKPGASVKVSCKASGYTFTSYVMHWVRQKPGQGLEWIG | 75 |
| | chain | YINPYNEGTESTDKFKGRATMTSDKSTSTVYMELSSLRSEDTAVYYCAS | |
| | | IYYGYEGTYFGVWGQGTLVTVSSASTKGPSVFPLAPSSKSTSGGTAALG | |
| | | CLVKDYFPEPVTVSWNSGALTSGVHTFPAVLQSSGLYSLSSVVTVPSSS | |
| | | LGTQTYICNVNHKPSNTKVDKKVEPKSCDKTHTCPPCPAPELLGPSVFL | |
| | | FPPKPKDTLMISRTPEVTCVVVDVSHEDPEVKFNWYVDGVEVHNAKTKP | |
| | | REEQYNSTYRVVSVLTVLHQDWLNGKEYKCKVSNKALPAPIEKTISKAK | |
| | | GQPREPQVYVYPPSREEMTKNQVSLTCLVKGFYPSDIAVEWESNGQPEN | |
| | | NYKTTPPVLDSDGSFALVSKLTVDKSRWQQGNVFSCSVMHEALHNHYTQ | |
| | | KSLSLSPGK | |
| | 2^{nd} | QVQLVQSGAEVKKPGASVKVSCKASGYTFTGYYMHWVRQAPGQGLEWMG | 76 |
| | chain | WINPDSGGTNYAQKFQGRVTMTRDTSISTAYMELNRLRSDDTAVYYCAR | |
| | | DQPLGYCTNGVCSYFDYWGQGTLVTVSSASVAAPSVFIFPPSDEQLKSG | |
| | | TASVVCLLNNFYPREAKVQWKVDNALQSGNSQESVTEQDSKDSTYSLSS | |
| | | TLTLSKADYEKHKVYACEVTHQGLSSPVTKSFNRGECDKTHTCPPCPAP | |
| | | ELLGPSVFLFPPKPKDTLMISRTPEVTCVVVDVSHEDPEVKFNWYVDGV | |
| | | EVHNAKTKPREEQYNSTYRVVSVLTVLHQDWLNGKEYKCKVSNKALPAP | |
| | | IEKTISKAKGQPREPQVYVLPPSREEMTKNQVSLLCLVKGFYPSDIAVE | |
| | | WESNGQPENNYLTWPPVLDSDGSFFLYSKLTVDKSRWQQGNVFSCSVMH | |
| | | EALHNRFTQKSLSLSPGK | |
| | 3^{rd} | EIVLTQSPATLSLSPGERATLSCRASSSVSYMHWYQQKPGQAPRPWIYA | 77 |
| | chain | TSNLASGIPARFSGSRSGTDYTLTISSLEPEDFAVYYCQQWSSNTLTFG | |
| | | GGTKVEIKRTVAAPSVFIFPPSDEQLKSGTASVVCLLNNFYPREAKVQW | |
| | | KVDNALQSGNSQESVTEQDSKDSTYSLSSTLTLSKADYEKHKVYACEVT | |
| | | HQGLSSPVTKSFNRGEC | |
| | 4^{th} | DIQMTQSPSSVSASVGDRVTITCRASQGIYSWLAWYQQKPGKAPNLLIY | 78 |
| | chain | TASTLQSGVPSRFSGSGSGTDFTLTISSLQPEDFATYYCQQANIFPLTF | |
| | | GGGTKVEIKSSASTKGPSVFPLAPSSKSTSGGTAALGCLVKDYFPEPVT | |
| | | VSWNSGALTSGVHTFPAVLQSSGLYSLSSVVTVPSSSLGTQTYICNVNH | |
| | | KPSNTKVDKKVEPKSC | |
| Ly1935 | 1^{st} | QVQLVQSGAEVKKPGASVKVSCKASGYTFTSYVMHWVRQKPGQGLEWIG | 79 |
| | chain | YINPYNEGTESTDKFKGRATMTSDKSTSTVYMELSSLRSEDTAVYYCAS | |
| | | IYYGYEGTYFGVWGQGTLVTVSSASTKGPSVFPLAPSSKSTSGGTAALG | |
| | | CLVKDYFPEPVTVSWNSGALTSGVHTFPAVLQSSGLYSLSSVVTVPSSS | |
| | | LGTQTYICNVNHKPSNTKVDKKVEPKSCDKTHTCPPCPAPELLGPSVFL | |
| | | FPPKPKDTLMISRTPEVTCVVVDVSHEDPEVKFNWYVDGVEVHNAKTKP | |
| | | REEQYNSTYRVVSVLTVLHQDWLNGKEYKCKVSNKALPAPIEKTISKAK | |
| | | GQPREPQVYTLPPCREEMTKNQVSLWCLVKGFYPSDIAVEWESNGQPEN | |
| | | NYKTTPPVLDSDGSFFLYSKLTVDKSRWQQGNVFSCSVMHEALHNHYTQ | |
| | | KSLSLSPGK | |
| | 2^{nd} | QVQLVQSGAEVKKPGASVKVSCKASGYTFTGYYMHWVRQAPGQGLEWMG | 80 |
| | chain | WINPDSGGTNYAQKFQGRVTMTRDTSISTAYMELNRLRSDDTAVYYCAR | |
| | | DQPLGYCTNGVCSYFDYWGQGTLVTVSSDLKNVFPPEVAVFEPSEAEIS | |
| | | HTQKATLVCLATGFYPDHVELSWWVNGKEVHSGVCTDPQPLKEQPALQD | |
| | | SRYALSSRLRVSATFWQNPRNHFRCQVQFYGLSENDEWTQDRAKPVTQI | |
| | | VSAEAWGRASDKTHTCPPCPAPELLGPSVFLFPPKPKDTLMISRTPEVT | |
| | | CVVVDVSHEDPEVKFNWYVDGVEVHNAKTKPREEQYNSTYRVVSVLTVL | |
| | | HQDWLNGKEYKCKVSNKALPAPIEKTISKAKGQPREPQVCTLPPSREEM | |
| | | TKNQVSLSCAVKGFYPSDIAVEWESNGQPENNYKTTPPVLDSDGSFFLV | |
| | | SKLTVDKSRWQQGNVFSCSVMHEALHNRFTQKSLSLSPGK | |
| | 3^{rd} | EIVLTQSPATLSLSPGERATLSCRASSSVSYMHWYQQKPGQAPRPWIYA | 81 |
| | chain | TSNLASGIPARFSGSRSGTDYTLTISSLEPEDFAVYYCQQWSSNTLTFG | |
| | | GGTKVEIKRTVAAPSVFIFPPSDEQLKSGTASVVCLLNNFYPREAKVQW | |
| | | KVDNALQSGNSQESVTEQDSKDSTYSLSSTLTLSKADYEKHKVYACEVT | |
| | | HQGLSSPVTKSFNRGEC | |
| | 4^{th} | DIQMTQSPSSVSASVGDRVTITCRASQGIYSWLAWYQQKPGKAPNLLIY | 82 |
| | chain | TASTLQSGVPSRFSGSGSGTDFTLTISSLQPEDFATYYCQQANIFPLTF | |
| | | GGGTKVEIKPDIQNPDPAVYQLRDSKSSDKSVCLFTDFDSQTQVSQSKD | |
| | | SDVYITDKCVLDMRSMDFKSNSAVAWSQKSDFACANAFQNSIIPEDTFF | |
| | | PSPESS | |
| Ly1936 | 1^{st} | QVQLVQSGAEVKKPGASVKVSCKASGYTFTSYVMHWVRQKPGQGLEWIG | 83 |
| | chain | YINPYNEGTESTDKFKGRATMTSDKSTSTVYMELSSLRSEDTAVYYCAS | |
| | | IYYGYEGTYFGVWGQGTLVTVSSASTKGPSVFPLAPSSKSTSGGTAALG | |
| | | CLVKDYFPEPVTVSWNSGALTSGVHTFPAVLQSSGLYSLSSVVTVPSSS | |
| | | LGTQTYICNVNHKPSNTKVDKKVEPKSCDKTHTCPPCPAPELLGPSVFL | |
| | | FPPKPKDTLMISRTPEVTCVVVDVSHEDPEVKFNWYVDGVEVHNAKTKP | |
| | | REEQYNSTYRVVSVLTVLHQDWLNGKEYKCKVSNKALPAPIEKTISKAK | |
| | | GQPREPQVYTLPPCREEMTKNQVSLWCLVKGFYPSDIAVEWESNGQPEN | |
| | | NYKTTPPVLDSDGSFFLYSKLTVDKSRWQQGNVFSCSVMHEALHNHYTQ | |
| | | KSLSLSPGK | |
| | 2^{nd} | QVQLVQSGAEVKKPGASVKVSCKASGYTFTSYVMHWVRQKPGQGLEWIG | 84 |
| | chain | YINPYNEGTESTDKFKGRATMTSDKSTSTVYMELSSLRSEDTAVYYCAS | |
| | | IYYGYEGTYFGVWGQGTLVTVSSASTKGPSVFPLAPSSKSTSGGTAALG | |
| | | CLVKDYFPEPVTVSWNSGALTSGVHTFPAVLQSSGLYSLSSVVTVPSSS | |
| | | LGTQTYICNVNHKPSNTKVDKKVEPKSCGGGGSGGGGSGGGGSGGGGSQ | |
| | | VQLVQSGAEVKKPGASVKVSCKASGYTFTGYYMHWVRQAPGQGLEWMGW | |
| | | INPDSGGTNYAQKFQGRVTMTRDTSISTAYMELNRLRSDDTAVYYCARD | |
| | | QPLGYCTNGVCSYFDYWGQGTLVTVSSDLKNVFPPEVAVFEPSEAEISH | |
| | | TQKATLVCLATGFYPDHVELSWWVNGKEVHSGVCTDPQPLKEQPALQDS | |
| | | RYALSSRLRVSATFWQNPRNHERCQVQFYGLSENDEWTQDRAKPVTQIV | |
| | | SAEAWGRASDKTHTCPPCPAPELLGPSVFLFPPKPKDTLMISRTPEVTC | |
| | | VVVDVSHEDPEVKFNWYVDGVEVHNAKTKPREEQYNSTYRVVSVLTVLH | |
| | | QDWLNGKEYKCKVSNKALPAPIEKTISKAKGQPREPQVYTLPPSREEMT | |
| | | KNQVSLSCAVKGFYPSDIAVEWESNGQPENNYKTTPPVLDSDGSFFLVS | |
| | | KLTVDKSRWQQGNVFSCSVMHEALHNRFTQKSLSLSPGK | |
| | 3^{rd} | EIVLTQSPATLSLSPGERATLSCRASSSVSYMHWYQQKPGQAPRPWIYA | 85 |
| | chain | TSNLASGIPARFSGSRSGTDYTLTISSLEPEDFAVYYCQQWSSNTLTFG | |
| | | GGTKVEIKRTVAAPSVFIFPPSDEQLKSGTASVVCLLNNFYPREAKVQW | |
| | | KVDNALQSGNSQESVTEQDSKDSTYSLSSTLTLSKADYEKHKVYACEVT | |
| | | HQGLSSPVTKSFNRGEC | |
| | 4^{th} | DIQMTQSPSSVSASVGDRVTITCRASQGIYSWLAWYQQKPGKAPNLLIY | 86 |
| | chain | TASTLQSGVPSRFSGSGSGTDFTLTISSLQPEDFATYYCQQANIFPLTF | |
| | | GGGTKVEIKPDIQNPDPAVYQLRDSKSSDKSVCLFTDFDSQTQVSQSKD | |
| | | SDVYITDKCVLDMRSMDFKSNSAVAWSQKSDFACANAFQNSIIPEDTFF | |
| | | PSPESS | |

### Characterization of Anti-B7H3/CD40 Bi-Specific Antibodies

### (i) Binding Activity

[0321] Anti-B7H3/CD40 bi-specific antibodies were analyzed by FACS for their binding properties to human CD40 and/or human B7H3 expressed on CHO cells as described above.

[0322] As shown in FIGS. 2A and 2B, the exemplary anti-CD40/B7H3 bi-specific antibodies exhibited a various range of binding affinity to human B7H3 expressed on the CHO cells. As shown in FIGS. 2C and 2D, the bi-specific antibodies exhibited different levels of binding affinity to humanCD40 expressed on CHO cells.

### (ii) Agonistic Activity for CD40

[0323] To determine the agonist activity of these anti-B7H3/CD40 bi-specific antibodies, a CD40 reporter assay was developed, which involves reporter cells over-expressing human CD40. The CD40 reporter assay was performed in co-culture with or without B7H3-expressing CHO cells following the procedures as described below. This GS-H2-huCD40 reporter cells were re-suspended and diluted to 1×104 cells/mL with assay buffer (MEM containing 1% FBS). The cells were added at 100 μL/well, such that the final cell number was 1000 cells/well in the assay plate (Nunc, Cat #167425). Samples were added at 100 uL/well test sample at 2× final concentrations to the assay plate. The assay plate was incubated in 37° C., 5% CO2 incubator for 18-20 hours. After the 18-20 hour incubation, 8 μL of the supernatant from each well of the assay plate was collected and added to HTRF detection assay plate (Nunc). A Human Interleukin 8 (reporter of CD40 activation) detection assay was performed using a Human IL-8 Assay Kit (Cisbio, Cat #62IL8PEB). In particular, 16 μL assay volume was used. The results were read using Time Resolved Fluorescence by Tecan F200pro and the relative light unit data was recorded.

[0324] As shown in FIGS. 3A-3F, the tested examplary bi-specific antibodies showed enhanced or varied CD40 agonist activity in presence of human B7H3 expressing cells, as compared to the condition at the absence of human B7H3 expressing cells. Binding to both CD40 and B7H3 by the tested bi-specific antibodies simultaneously in a microenvironment would affect individual binding and therefore CD40 agonist activities.

(iii) Anti-Tumor Activity

[0325] Exemplary anti-B7H3/CD40 antibodies were tested in mouse syngeneic tumor models in vivo to determine the anti-tumor efficacy of these antibodies. C57BL6 mice with human CD40 knock-in were used to develop syngeneic mouse tumor models. Human B7H3 overexpressing murine colon cancer MC38 tumor cells were subcutaneously implanted into the mice. Mice were grouped when the tumor size was approximately 150±50 mm3 (n=6). Anti-B7H3/CD40 antibodies were administered by intraperitoneal injections and tumor sizes were measure during 4-6 weeks of antibody treatment. Tumor sizes were measured by caliber 2 times a week and calculated as tumor volume using formula of 0.5×length×width2.

[0326] Anti-tumor efficacy was evaluated between tumor sizes of the control group and antibody treatment group as shown in FIGS. 4A-4C. The parent anti-CD40 antibody was used as reference. Several of the bispecific antibodies including Ly1581, Ly1579, Ly1663 and Ly1585 showed much stronger efficacy compared to the parent anti-CD40 antibody (FIGS. 4A-4B), and better safety (FIG. 4C).

[0327] Anti-B7H3/CD40 antibodies are evaluated for their in vitro and in vivo activity.

### Example 4: Anti-B7H3/CD137 Bi-Specific Antibodies

[0328] Anti-B7H3/CD137 bi-specific antibodies were produced and characterized using parent anti-B7H3 antibody clone Ly1612, parent anti-CD137 antibody clone CD137 Ab1. The amino acid sequences of the V_{H} and the V_{L} of the parent clones are provided in Table 1 above. The heavy chain and light chain complementary determining regions determined by the Kabat scheme are in boldface.

[0329] cDNAs encoding the heavy chain variable region (V_{H}) and the light chain variable region (V_{L}) of the parent clones were used as the starting materials for making these bi-specific antibodies. CHO-cell transient expression was carried out with plasmids configured for expressing the polypeptide chains of the bi-specific antibodies. These resultant bispecific antibodies were purified by protein A affinity chromatography.

[0330] The amino acid sequences of the polypeptides of exemplary bi-specific antibodies are provided in Table 4 below.

TABLE 4
Exemplary Anti-B7H3/CD137 Bi-Specific Antibodies

| | | | SED ID |
|---|---|---|---|
| Antibody Clones | | Amino acid sequence | NO: |
| Ly1937 | 1^{st} | QVQLVQSGAEVKKPGASVKVSCKASGYTFTSYVMHWVRQKPGQGLEWIG | 87 |
| | chain | YINPYNEGTESTDKFKGRATMTSDKSTSTVYMELSSLRSEDTAVYYCAS | |
| | | IYYGYEGTYFGVWGQGTLVTVSSASTKGPSVFPLAPSSKSTSGGTAALG | |
| | | CLVKDYFPEPVTVSWNSGALTSGVHTFPAVLQSSGLYSLSSVVTVPSSS | |
| | | LGTQTYICNVNHKPSNTKVDKKVEPKSCDKTHTCPPCPAPELLGPSVFL | |
| | | FPPKPKDTLMISRTPEVTCVVVDVSHEDPEVKFNWYVDGVEVHNAKTKP | |
| | | REEQYNSTYRVVSVLTVLHQDWLNGKEYKCKVSNKALPAPIEKTISKAK | |
| | | GQPREPQVYTLPPSREEMTKNQVSLTCLVKGFYPSDIAVEWESNGQPEN | |
| | | NYKTTPPVLDSDGSFFLYSKLTVDKSRWQQGNVFSCSVMHEALHNHYTQ | |
| | | KSLSLSPGGGGGSGGGGSGGGGSGGGGSQVQLVQSGAEVKKPGASVKVS | |
| | | CKASGYTFAGFEMHWVRQAPGQGLEWMGAIDPKTGGTDYNQKFKDRVTM | |
| | | TRDTSISTAYMELSRLRSDDTAVYYCARDLGYFDVWGQGTLVTVSSGGG | |
| | | GSGGGGSGGGGSGGGGSDIQMTQSPSSLSASVGDRVTITCRASQDIRSN | |
| | | LNWYQQKPGGAVKLLIYYTSRLHSGVPSRFSGSGSGTDYTLTISSLQPE | |
| | | DFATYFCQQSEKLPRTFGGGTKVEIR | |
| | 2^{nd} | EIVLTQSPATLSLSPGERATLSCRASSSVSYMHWYQQKPGQAPRPWIYA | 88 |
| | chain | TSNLASGIPARFSGSRSGTDYTLTISSLEPEDFAVYYCQQWSSNTLTFG | |
| | | GGTKVEIKRTVAAPSVFIFPPSDEQLKSGTASVVCLLNNFYPREAKVQW | |
| | | KVDNALQSGNSQESVTEQDSKDSTYSLSSTLTLSKADYEKHKVYACEVT | |
| | | HQGLSSPVTKSFNRGEC | |
| Ly1938 | 1^{st} | QVQLVQSGAEVKKPGASVKVSCKASGYTFTSYVMHWVRQKPGQGLEWIG | 89 |
| | chain | YINPYNEGTESTDKFKGRATMTSDKSTSTVYMELSSLRSEDTAVYYCAS | |
| | | IYYGYEGTYFGVWGQGTLVTVSSASTKGPSVFPLAPSSKSTSGGTAALG | |
| | | CLVKDYFPEPVTVSWNSGALTSGVHTFPAVLQSSGLYSLSSVVTVPSSS | |
| | | LGTQTYICNVNHKPSNTKVDKKVEPKSCDKTHTCPPCPAPELLGPSVFL | |
| | | FPPKPKDTLMISRTPEVTCVVVDVSHEDPEVKFNWYVDGVEVHNAKTKP | |
| | | REEQYNSTYRVVSVLTVLHQDWLNGKEYKCKVSNKALPAPIEKTISKAK | |
| | | GQPREPQVYTLPPSREEMTKNQVSLTCLVKGFYPSDIAVEWESNGQPEN | |
| | | NYKTTPPVLDSDGSFFLYSKLTVDKSRWQQGNVFSCSVMHEALHNHYTQ | |
| | | KSLSLSPGK | |
| | 2^{nd} | EIVLTQSPATLSLSPGERATLSCRASSSVSYMHWYQQKPGQAPRPWIYA | 90 |
| | chain | TSNLASGIPARFSGSRSGTDYTLTISSLEPEDFAVYYCQQWSSNTLTFG | |
| | | GGTKVEIKRTVAAPSVFIFPPSDEQLKSGTASVVCLLNNFYPREAKVQW | |
| | | KVDNALQSGNSQESVTEQDSKDSTYSLSSTLTLSKADYEKHKVYACEVT | |
| | | HQGLSSPVTKSFNRGECGGGGSGGGGSGGGGSGGGGSQVQLVQSGAEVK | |
| | | KPGASVKVSCKASGYTFAGFEMHWVRQAPGQGLEWMGAIDPKTGGTDYN | |
| | | QKFKDRVTMTRDTSISTAYMELSRLRSDDTAVYYCARDLGYFDVWGQGT | |
| | | LVTVSSGGGGSGGGGSGGGGSGGGGSDIQMTQSPSSLSASVGDRVTITC | |
| | | RASQDIRSNLNWYQQKPGGAVKLLIYYTSRLHSGVPSRFSGSGSGTDYT | |
| | | LTISSLQPEDFATYFCQQSEKLPRTFGGGTKVEIR | |
| Ly1939 | 1^{st} | QVQLVQSGAEVKKPGASVKVSCKASGYTFAGFEMHWVRQAPGQGLEWMG | 91 |
| | chain | AIDPKTGGTDYNQKFKDRVTMTRDTSISTAYMELSRLRSDDTAVYYCAR | |
| | | DLGYFDVWGQGTLVTVSSGGGGSGGGGSGGGGSGGGGSDIQMTQSPSSL | |
| | | SASVGDRVTITCRASQDIRSNLNWYQQKPGGAVKLLIYYTSRLHSGVPS | |
| | | RFSGSGSGTDYTLTISSLQPEDFATYFCQQSEKLPRTFGGGTKVEIRGG | |
| | | GGSGGGGSGGGGSGGGGSQVQLVQSGAEVKKPGASVKVSCKASGYTFTS | |
| | | YVMHWVRQKPGQGLEWIGYINPYNEGTESTDKFKGRATMTSDKSTSTVY | |
| | | MELSSLRSEDTAVYYCASIYYGYEGTYFGVWGQGTLVTVSSASTKGPSV | |
| | | FPLAPSSKSTSGGTAALGCLVKDYFPEPVTVSWNSGALTSGVHTFPAVL | |
| | | QSSGLYSLSSVVTVPSSSLGTQTYICNVNHKPSNTKVDKKVEPKSCDKT | |
| | | HTCPPCPAPELLGPSVFLFPPKPKDTLMISRTPEVTCVVVDVSHEDPEV | |
| | | KFNWYVDGVEVHNAKTKPREEQYNSTYRVVSVLTVLHQDWLNGKEYKCK | |
| | | VSNKALPAPIEKTISKAKGQPREPQVYTLPPSREEMTKNQVSLTCLVKG | |
| | | FYPSDIAVEWESNGQPENNYKTTPPVLDSDGSFFLYSKLTVDKSRWQQG | |
| | | NVFSCSVMHEALHNHYTQKSLSLSPGK | |
| | 2^{nd} | EIVLTQSPATLSLSPGERATLSCRASSSVSYMHWYQQKPGQAPRPWIYA | 92 |
| | chain | TSNLASGIPARFSGSRSGTDYTLTISSLEPEDFAVYYCQQWSSNTLTFG | |
| | | GGTKVEIKRTVAAPSVFIFPPSDEQLKSGTASVVCLLNNFYPREAKVQW | |
| | | KVDNALQSGNSQESVTEQDSKDSTYSLSSTLTLSKADYEKHKVYACEVT | |
| | | HQGLSSPVTKSFNRGEC | |
| Ly1940 | 1^{st} | QVQLVQSGAEVKKPGASVKVSCKASGYTFTSYVMHWVRQKPGQGLEWIG | 93 |
| | chain | YINPYNEGTESTDKFKGRATMTSDKSTSTVYMELSSLRSEDTAVYYCAS | |
| | | IYYGYEGTYFGVWGQGTLVTVSSASTKGPSVFPLAPSSKSTSGGTAALG | |
| | | CLVKDYFPEPVTVSWNSGALTSGVHTFPAVLQSSGLYSLSSVVTVPSSS | |
| | | LGTQTYICNVNHKPSNTKVDKKVEPKSCDKTHTCPPCPAPELLGPSVFL | |
| | | FPPKPKDTLMISRTPEVTCVVVDVSHEDPEVKFNWYVDGVEVHNAKTKP | |
| | | REEQYNSTYRVVSVLTVLHQDWLNGKEYKCKVSNKALPAPIEKTISKAK | |
| | | GQPREPQVYTLPPCREEMTKNQVSLWCLVKGFYPSDIAVEWESNGQPEN | |
| | | NYKTTPPVLDSDGSFFLYSKLTVDKSRWQQGNVFSCSVMHEALHNHYTQ | |
| | | KSLSLSPGK | |
| | 2^{nd} | QVQLVQSGAEVKKPGASVKVSCKASGYTFAGFEMHWVRQAPGQGLEWMG | 94 |
| | chain | AIDPKTGGTDYNQKFKDRVTMTRDTSISTAYMELSRLRSDDTAVYYCAR | |
| | | DLGYFDVWGQGTLVTVSSASVAAPSVFIFPPSDEQLKSGTASVVCLLNN | |
| | | FYPREAKVQWKVDNALQSGNSQESVTEQDSKDSTYSLSSTLTLSKADYE | |
| | | KHKVYACEVTHQGLSSPVTKSFNRGECDKTHTCPPCPAPELLGPSVFLF | |
| | | PPKPKDTLMISRTPEVTCVVVDVSHEDPEVKFNWYVDGVEVHNAKTKPR | |
| | | EEQYNSTYRVVSVLTVLHQDWLNGKEYKCKVSNKALPAPIEKTISKAKG | |
| | | QPREPQVCTLPPSREEMTKNQVSLSCAVKGFYPSDIAVEWESNGQPENN | |
| | | YKTTPPVLDSDGSFFLVSKLTVDKSRWQQGNVFSCSVMHEALHNRFTQK | |
| | | SLSLSPGK | |
| | 3^{rd} | EIVLTQSPATLSLSPGERATLSCRASSSVSYMHWYQQKPGQAPRPWIYA | 95 |
| | chain | TSNLASGIPARFSGSRSGTDYTLTISSLEPEDFAVYYCQQWSSNTLTFG | |
| | | GGTKVEIKRTVAAPSVFIFPPSDEQLKSGTASVVCLLNNFYPREAKVQW | |
| | | KVDNALQSGNSQESVTEQDSKDSTYSLSSTLTLSKADYEKHKVYACEVT | |
| | | HQGLSSPVTKSFNRGEC | |
| | 4^{th} | DIQMTQSPSSLSASVGDRVTITCRASQDIRSNLNWYQQKPGGAVKLLIY | 96 |
| | chain | YTSRLHSGVPSRFSGSGSGTDYTLTISSLQPEDFATYFCQQSEKLPRTF | |
| | | GGGTKVEIRSSASTKGPSVFPLAPSSKSTSGGTAALGCLVKDYFPEPVT | |
| | | VSWNSGALTSGVHTFPAVLQSSGLYSLSSVVTVPSSSLGTQTYICNVNH | |
| | | KPSNTKVDKKVEPKSC | |
| Ly1941 | 1^{st} | QVQLVQSGAEVKKPGASVKVSCKASGYTFTSYVMHWVRQKPGQGLEWIG | 97 |
| | chain | YINPYNEGTESTDKFKGRATMTSDKSTSTVYMELSSLRSEDTAVYYCAS | |
| | | IYYGYEGTYFGVWGQGTLVTVSSASTKGPSVFPLAPSSKSTSGGTAALG | |
| | | CLVKDYFPEPVTVSWNSGALTSGVHTFPAVLQSSGLYSLSSVVTVPSSS | |
| | | LGTQTYICNVNHKPSNTKVDKKVEPKSCDKTHTCPPCPAPELLGPSVFL | |
| | | FPPKPKDTLMISRTPEVTCVVVDVSHEDPEVKFNWYVDGVEVHNAKTKP | |
| | | REEQYNSTYRVVSVLTVLHQDWLNGKEYKCKVSNKALPAPIEKTISKAK | |
| | | GQPREPQVYTDPPSREEMTKNQVSLTCEVKGFYPSDIAVEWESNGQPEN | |
| | | NYKTTPPVLDSDGSFFLYSKLTVDKSRWQQGNVFSCSVMHEALHNHYTQ | |
| | | KSLSLSPGK | |
| | 2^{nd} | QVQLVQSGAEVKKPGASVKVSCKASGYTFAGFEMHWVRQAPGQGLEWMG | 98 |
| | chain | AIDPKTGGTDYNQKFKDRVTMTRDTSISTAYMELSRLRSDDTAVYYCAR | |
| | | DLGYFDVWGQGTLVTVSSASVAAPSVFIFPPSDEQLKSGTASVVCLLNN | |
| | | FYPREAKVQWKVDNALQSGNSQESVTEQDSKDSTYSLSSTLTLSKADYE | |
| | | KHKVYACEVTHQGLSSPVTKSFNRGECDKTHTCPPCPAPELLGPSVFLF | |
| | | PPKPKDTLMISRTPEVTCVVVDVSHEDPEVKFNWYVDGVEVHNAKTKPR | |
| | | EEQYNSTYRVVSVLTVLHQDWLNGKEYKCKVSNKALPAPIEKTISKAKG | |
| | | QPREPQVYTKPPSREEMTKNQVSLTCKVKGFYPSDIAVEWESNGQPENN | |
| | | YKTTPPVLDSDGSFFLYSKLTVDKSRWQQGNVFSCSVMHEALHNRFTQK | |
| | | SLSLSPGK | |
| | 3^{rd} | EIVLTQSPATLSLSPGERATLSCRASSSVSYMHWYQQKPGQAPRPWIYA | 99 |
| | chain | TSNLASGIPARFSGSRSGTDYTLTISSLEPEDFAVYYCQQWSSNTLTFG | |
| | | GGTKVEIKRTVAAPSVFIFPPSDEQLKSGTASVVCLLNNFYPREAKVQW | |
| | | KVDNALQSGNSQESVTEQDSKDSTYSLSSTLTLSKADYEKHKVYACEVT | |
| | | HQGLSSPVTKSFNRGEC | |
| | 4^{th} | DIQMTQSPSSLSASVGDRVTITCRASQDIRSNLNWYQQKPGGAVKLLIY | 100 |
| | chain | YTSRLHSGVPSRFSGSGSGTDYTLTISSLQPEDFATYFCQQSEKLPRTF | |
| | | GGGTKVEIRSSASTKGPSVFPLAPSSKSTSGGTAALGCLVKDYFPEPVT | |
| | | VSWNSGALTSGVHTFPAVLQSSGLYSLSSVVTVPSSSLGTQTYICNVNH | |
| | | KPSNTKVDKKVEPKSC | |
| Ly1942 | 1^{st} | QVQLVQSGAEVKKPGASVKVSCKASGYTFTSYVMHWVRQKPGQGLEWIG | 101 |
| | chain | YINPYNEGTESTDKFKGRATMTSDKSTSTVYMELSSLRSEDTAVYYCAS | |
| | | IYYGYEGTYFGVWGQGTLVTVSSASTKGPSVFPLAPSSKSTSGGTAALG | |
| | | CLVKDYFPEPVTVSWNSGALTSGVHTFPAVLQSSGLYSLSSVVTVPSSS | |
| | | LGTQTYICNVNHKPSNTKVDKKVEPKSCDKTHTCPPCPAPELLGPSVFL | |
| | | FPPKPKDTLMISRTPEVTCVVVDVSHEDPEVKFNWYVDGVEVHNAKTKP | |
| | | REEQYNSTYRVVSVLTVLHQDWLNGKEYKCKVSNKALPAPIEKTISKAK | |
| | | GQPREPQVYVYPPSREEMTKNQVSLTCLVKGFYPSDIAVEWESNGQPEN | |
| | | NYKTTPPVLDSDGSFALVSKLTVDKSRWQQGNVFSCSVMHEALHNHYTQ | |
| | | KSLSLSPGK | |
| | 2^{nd} | QVQLVQSGAEVKKPGASVKVSCKASGYTFAGFEMHWVRQAPGQGLEWMG | 102 |
| | chain | AIDPKTGGTDYNQKFKDRVTMTRDTSISTAYMELSRLRSDDTAVYYCAR | |
| | | DLGYFDVWGQGTLVTVSSASVAAPSVFIFPPSDEQLKSGTASVVCLLNN | |
| | | FYPREAKVQWKVDNALQSGNSQESVTEQDSKDSTYSLSSTLTLSKADYE | |
| | | KHKVYACEVTHQGLSSPVTKSFNRGECDKTHTCPPCPAPELLGPSVFLF | |
| | | PPKPKDTLMISRTPEVTCVVVDVSHEDPEVKFNWYVDGVEVHNAKTKPR | |
| | | EEQYNSTYRVVSVLTVLHQDWLNGKEYKCKVSNKALPAPIEKTISKAKG | |
| | | QPREPQVYVLPPSREEMTKNQVSLLCLVKGFYPSDIAVEWESNGQPENN | |
| | | YLTWPPVLDSDGSFFLYSKLTVDKSRWQQGNVFSCSVMHEALHNRFTQK | |
| | | SLSLSPGK | |
| | 3^{rd} | EIVLTQSPATLSLSPGERATLSCRASSSVSYMHWYQQKPGQAPRPWIYA | 103 |
| | chain | TSNLASGIPARFSGSRSGTDYTLTISSLEPEDFAVYYCQQWSSNTLTFG | |
| | | GGTKVEIKRTVAAPSVFIFPPSDEQLKSGTASVVCLLNNFYPREAKVQW | |
| | | KVDNALQSGNSQESVTEQDSKDSTYSLSSTLTLSKADYEKHKVYACEVT | |
| | | HQGLSSPVTKSFNRGEC | |
| | 4^{th} | DIQMTQSPSSLSASVGDRVTITCRASQDIRSNLNWYQQKPGGAVKLLIY | 104 |
| | chain | YTSRLHSGVPSRFSGSGSGTDYTLTISSLQPEDFATYFCQQSEKLPRTF | |
| | | GGGTKVEIRSSASTKGPSVFPLAPSSKSTSGGTAALGCLVKDYFPEPVT | |
| | | VSWNSGALTSGVHTFPAVLQSSGLYSLSSVVTVPSSSLGTQTYICNVNH | |
| | | KPSNTKVDKKVEPKSC | |
| Ly1943 | 1^{st} | QVQLVQSGAEVKKPGASVKVSCKASGYTFTSYVMHWVRQKPGQGLEWIG | 105 |
| | chain | YINPYNEGTESTDKFKGRATMTSDKSTSTVYMELSSLRSEDTAVYYCAS | |
| | | IYYGYEGTYFGVWGQGTLVTVSSASTKGPSVFPLAPSSKSTSGGTAALG | |
| | | CLVKDYFPEPVTVSWNSGALTSGVHTFPAVLQSSGLYSLSSVVTVPSSS | |
| | | LGTQTYICNVNHKPSNTKVDKKVEPKSCDKTHTCPPCPAPELLGPSVFL | |
| | | FPPKPKDTLMISRTPEVTCVVVDVSHEDPEVKFNWYVDGVEVHNAKTKP | |
| | | REEQYNSTYRVVSVLTVLHQDWLNGKEYKCKVSNKALPAPIEKTISKAK | |
| | | GQPREPQVYTLPPCREEMTKNQVSLWCLVKGFYPSDIAVEWESNGQPEN | |
| | | NYKTTPPVLDSDGSFFLYSKLTVDKSRWQQGNVFSCSVMHEALHNHYTQ | |
| | | KSLSLSPGK | |
| | 2^{nd} | QVQLVQSGAEVKKPGASVKVSCKASGYTFAGFEMHWVRQAPGQGLEWMG | 106 |
| | chain | AIDPKTGGTDYNQKFKDRVTMTRDTSISTAYMELSRLRSDDTAVYYCAR | |
| | | DLGYFDVWGQGTLVTVSSDLKNVFPPEVAVFEPSEAEISHTQKATLVCL | |
| | | ATGFYPDHVELSWWVNGKEVHSGVCTDPQPLKEQPALQDSRYALSSRLR | |
| | | VSATFWQNPRNHFRCQVQFYGLSENDEWTQDRAKPVTQIVSAEAWGRAS | |
| | | DKTHTCPPCPAPELLGPSVFLFPPKPKDTLMISRTPEVTCVVVDVSHED | |
| | | PEVKFNWYVDGVEVHNAKTKPREEQYNSTYRVVSVLTVLHQDWLNGKEY | |
| | | KCKVSNKALPAPIEKTISKAKGQPREPQVCTLPPSREEMTKNQVSLSCA | |
| | | VKGFYPSDIAVEWESNGQPENNYKTTPPVLDSDGSFFLVSKLTVDKSRW | |
| | | QQGNVFSCSVMHEALHNRFTQKSLSLSPGK | |
| | 3^{rd} | EIVLTQSPATLSLSPGERATLSCRASSSVSYMHWYQQKPGQAPRPWIYA | 107 |
| | chain | TSNLASGIPARFSGSRSGTDYTLTISSLEPEDFAVYYCQQWSSNTLTFG | |
| | | GGTKVEIKRTVAAPSVFIFPPSDEQLKSGTASVVCLLNNFYPREAKVQW | |
| | | KVDNALQSGNSQESVTEQDSKDSTYSLSSTLTLSKADYEKHKVYACEVT | |
| | | HQGLSSPVTKSFNRGEC | |
| | 4^{th} | DIQMTQSPSSLSASVGDRVTITCRASQDIRSNLNWYQQKPGGAVKLLIY | 108 |
| | chain | YTSRLHSGVPSRFSGSGSGTDYTLTISSLQPEDFATYFCQQSEKLPRTF | |
| | | GGGTKVEIRPDIQNPDPAVYQLRDSKSSDKSVCLFTDFDSQTQVSQSKD | |
| | | SDVYITDKCVLDMRSMDFKSNSAVAWSQKSDFACANAFQNSIIPEDTFF | |
| | | PSPESS | |
| Ly1944 | 1^{st} | QVQLVQSGAEVKKPGASVKVSCKASGYTFTSYVMHWVRQKPGQGLEWIG | 109 |
| | chain | YINPYNEGTESTDKFKGRATMTSDKSTSTVYMELSSLRSEDTAVYYCAS | |
| | | IYYGYEGTYFGVWGQGTLVTVSSASTKGPSVFPLAPSSKSTSGGTAALG | |
| | | CLVKDYFPEPVTVSWNSGALTSGVHTFPAVLQSSGLYSLSSVVTVPSSS | |
| | | LGTQTYICNVNHKPSNTKVDKKVEPKSCDKTHTCPPCPAPELLGPSVFL | |
| | | FPPKPKDTLMISRTPEVTCVVVDVSHEDPEVKFNWYVDGVEVHNAKTKP | |
| | | REEQYNSTYRVVSVLTVLHQDWLNGKEYKCKVSNKALPAPIEKTISKAK | |
| | | GQPREPQVYTLPPCREEMTKNQVSLWCLVKGFYPSDIAVEWESNGQPEN | |
| | | NYKTTPPVLDSDGSFFLYSKLTVDKSRWQQGNVFSCSVMHEALHNHYTQ | |
| | | KSLSLSPGK | |
| | 2^{nd} | QVQLVQSGAEVKKPGASVKVSCKASGYTFTSYVMHWVRQKPGQGLEWIG | 110 |
| | chain | YINPYNEGTESTDKFKGRATMTSDKSTSTVYMELSSLRSEDTAVYYCAS | |
| | | IYYGYEGTYFGVWGQGTLVTVSSASTKGPSVFPLAPSSKSTSGGTAALG | |
| | | CLVKDYFPEPVTVSWNSGALTSGVHTFPAVLQSSGLYSLSSVVTVPSSS | |
| | | LGTQTYICNVNHKPSNTKVDKKVEPKSCGGGGSGGGGSGGGGSGGGGSQ | |
| | | VQLVQSGAEVKKPGASVKVSCKASGYTFAGFEMHWVRQAPGQGLEWMGA | |
| | | IDPKTGGTDYNQKFKDRVTMTRDTSISTAYMELSRLRSDDTAVYYCARD | |
| | | LGYFDVWGQGTLVTVSSDLKNVFPPEVAVFEPSEAEISHTQKATLVCLA | |
| | | TGFYPDHVELSWWVNGKEVHSGVCTDPQPLKEQPALQDSRYALSSRLRV | |
| | | SATFWQNPRNHFRCQVQFYGLSENDEWTQDRAKPVTQIVSAEAWGRASD | |
| | | KTHTCPPCPAPELLGPSVFLFPPKPKDTLMISRTPEVTCVVVDVSHEDP | |
| | | EVKFNWYVDGVEVHNAKTKPREEQYNSTYRVVSVLTVLHQDWLNGKEYK | |
| | | CKVSNKALPAPIEKTISKAKGQPREPQVYTLPPSREEMTKNQVSLSCAV | |
| | | KGFYPSDIAVEWESNGQPENNYKTTPPVLDSDGSFFLVSKLTVDKSRWQ | |
| | | QGNVFSCSVMHEALHNRFTQKSLSLSPGK | |
| | 3^{rd} | EIVLTQSPATLSLSPGERATLSCRASSSVSYMHWYQQKPGQAPRPWIYA | 111 |
| | chain | TSNLASGIPARFSGSRSGTDYTLTISSLEPEDFAVYYCQQWSSNTLTFG | |
| | | GGTKVEIKRTVAAPSVFIFPPSDEQLKSGTASVVCLLNNFYPREAKVQW | |
| | | KVDNALQSGNSQESVTEQDSKDSTYSLSSTLTLSKADYEKHKVYACEVT | |
| | | HQGLSSPVTKSFNRGEC | |
| | 4^{th} | DIQMTQSPSSLSASVGDRVTITCRASQDIRSNLNWYQQKPGGAVKLLIY | 112 |
| | chain | YTSRLHSGVPSRFSGSGSGTDYTLTISSLQPEDFATYFCQQSEKLPRTF | |
| | | GGGTKVEIRPDIQNPDPAVYQLRDSKSSDKSVCLFTDFDSQTQVSQSKD | |
| | | SDVYITDKCVLDMRSMDFKSNSAVAWSQKSDFACANAFQNSIIPEDTFF | |
| | | PSPESS | |

### Characterization of Anti-B7H3/CD137 Bi-Specific Antibodies

[0331] These bispecific antibodies are evaluated for their in vitro and in vivo activity, including binding to target antigen (B7H3 and CD137), agonistic activity in CD137 reporter assay system, activation of immune cells, anti-tumor activity in mouse models.

### Example 5: Anti-B7H3/GITR Bi-Specific Antibodies

[0332] Anti-B7H3/GITR bi-specific antibodies were produced and characterized using parent anti-B7H-3 antibody clone Ly1612, parent anti-GITR antibody clones including TM677 (GITR Ab1). The amino acid sequences of the V_{H} and the V_{L} of the parent clones are provided in Table 1 above. The heavy chain and light chain complementary determining regions determined by the Kabat scheme are in boldface.

[0333] cDNAs encoding the heavy chain variable region (V_{H}) and the light chain variable region (V_{L}) of the parent clones were used as the starting materials for making these bi-specific antibodies. CHO-cell transient expression was carried out with plasmids configured for expressing the polypeptide chains of the bi-specific antibodies. These resultant bispecific antibodies were purified by protein A affinity chromatography.

[0334] The amino acid sequences of the polypeptides of exemplary bi-specific antibodies are provided in Table 5 below:

TABLE 5
Exemplary Anti-B7H3/GITR Bi-Specific Antibodies

| | | | SED ID |
|---|---|---|---|
| Antibody Clones | | Amino acid sequence | NO: |
| Ly1945 | 1^{st} | QVQLVQSGAEVKKPGASVKVSCKASGYTFTSYVMHWVRQKPGQGLEWIG | 113 |
| | chain | YINPYNEGTESTDKFKGRATMTSDKSTSTVYMELSSLRSEDTAVYYCAS | |
| | | IYYGYEGTYFGVWGQGTLVTVSSASTKGPSVFPLAPSSKSTSGGTAALG | |
| | | CLVKDYFPEPVTVSWNSGALTSGVHTFPAVLQSSGLYSLSSVVTVPSSS | |
| | | LGTQTYICNVNHKPSNTKVDKKVEPKSCDKTHTCPPCPAPELLGPSVFL | |
| | | FPPKPKDTLMISRTPEVTCVVVDVSHEDPEVKFNWYVDGVEVHNAKTKP | |
| | | REEQYNSTYRVVSVLTVLHQDWLNGKEYKCKVSNKALPAPIEKTISKAK | |
| | | GQPREPQVYTLPPSREEMTKNQVSLTCLVKGFYPSDIAVEWESNGQPEN | |
| | | NYKTTPPVLDSDGSFFLYSKLTVDKSRWQQGNVFSCSVMHEALHNHYTQ | |
| | | KSLSLSPGGGGGSGGGGSGGGGSGGGGSEIVLTQSPATLSLSPGERATL | |
| | | SCRASKSVRTGMHWYQQKPGQAPRLLIYGASNLESGIPARFSGSGSGTD | |
| | | FTLTISSLEPEDFAVYYCQQSWNHFTFGQGTKLEIKGGGGSGGGGSGGG | |
| | | GSGGGGSQVQLQESGPGLVKPSETLSLTCTVSGFSLTSYNVHWIRQPPG | |
| | | KGLEWIGVIWSGVRTDYNSVLKPRVTISVDTSKNQFSLKLSSVTAADTA | |
| | | VYYCARGTYDDNYHDVMDAWGQGTLVTVSS | |
| | 2^{nd} | EIVLTQSPATLSLSPGERATLSCRASSSVSYMHWYQQKPGQAPRPWIYA | 114 |
| | chain | TSNLASGIPARFSGSRSGTDYTLTISSLEPEDFAVYYCQQWSSNTLTFG | |
| | | GGTKVEIKRTVAAPSVFIFPPSDEQLKSGTASVVCLLNNFYPREAKVQW | |
| | | KVDNALQSGNSQESVTEQDSKDSTYSLSSTLTLSKADYEKHKVYACEVT | |
| | | HQGLSSPVTKSFNRGEC | |
| Ly1946 | 1^{st} | QVQLVQSGAEVKKPGASVKVSCKASGYTFTSYVMHWVRQKPGQGLEWIG | 115 |
| | chain | YINPYNEGTESTDKFKGRATMTSDKSTSTVYMELSSLRSEDTAVYYCAS | |
| | | IYYGYEGTYFGVWGQGTLVTVSSASTKGPSVFPLAPSSKSTSGGTAALG | |
| | | CLVKDYFPEPVTVSWNSGALTSGVHTFPAVLQSSGLYSLSSVVTVPSSS | |
| | | LGTQTYICNVNHKPSNTKVDKKVEPKSCDKTHTCPPCPAPELLGPSVFL | |
| | | FPPKPKDTLMISRTPEVTCVVVDVSHEDPEVKFNWYVDGVEVHNAKTKP | |
| | | REEQYNSTYRVVSVLTVLHQDWLNGKEYKCKVSNKALPAPIEKTISKAK | |
| | | GQPREPQVYTLPPSREEMTKNQVSLTCLVKGFYPSDIAVEWESNGQPEN | |
| | | NYKTTPPVLDSDGSFFLYSKLTVDKSRWQQGNVFSCSVMHEALHNHYTQ | |
| | | KSLSLSPGK | |
| | 2^{nd} | EIVLTQSPATLSLSPGERATLSCRASSSVSYMHWYQQKPGQAPRPWIYA | 116 |
| | chain | TSNLASGIPARFSGSRSGTDYTLTISSLEPEDFAVYYCQQWSSNTLTFG | |
| | | GGTKVEIKRTVAAPSVFIFPPSDEQLKSGTASVVCLLNNFYPREAKVQW | |
| | | KVDNALQSGNSQESVTEQDSKDSTYSLSSTLTLSKADYEKHKVYACEVT | |
| | | HQGLSSPVTKSFNRGECGGGGSGGGGSGGGGSGGGGSEIVLTQSPATLS | |
| | | LSPGERATLSCRASKSVRTGMHWYQQKPGQAPRLLIYGASNLESGIPAR | |
| | | FSGSGSGTDFTLTISSLEPEDFAVYYCQQSWNHFTFGQGTKLEIKGGGG | |
| | | SGGGGSGGGGSGGGGSQVQLQESGPGLVKPSETLSLTCTVSGFSLTSYN | |
| | | VHWIRQPPGKGLEWIGVIWSGVRTDYNSVLKPRVTISVDTSKNQFSLKL | |
| | | SSVTAADTAVYYCARGTYDDNYHDVMDAWGQGTLVTVSS | |
| Ly1947 | 1^{st} | EIVLTQSPATLSLSPGERATLSCRASKSVRTGMHWYQQKPGQAPRLLIY | 117 |
| | chain | GASNLESGIPARFSGSGSGTDFTLTISSLEPEDFAVYYCQQSWNHFTFG | |
| | | QGTKLEIKGGGGSGGGGSGGGGSGGGGSQVQLQESGPGLVKPSETLSLT | |
| | | CTVSGFSLTSYNVHWIRQPPGKGLEWIGVIWSGVRTDYNSVLKPRVTIS | |
| | | VDTSKNQFSLKLSSVTAADTAVYYCARGTYDDNYHDVMDAWGQGTLVTV | |
| | | SSGGGGSGGGGSGGGGSGGGGSQVQLVQSGAEVKKPGASVKVSCKASGY | |
| | | TFTSYVMHWVRQKPGQGLEWIGYINPYNEGTESTDKFKGRATMTSDKST | |
| | | STVYMELSSLRSEDTAVYYCASIYYGYEGTYFGVWGQGTLVTVSSASTK | |
| | | GPSVFPLAPSSKSTSGGTAALGCLVKDYFPEPVTVSWNSGALTSGVHTF | |
| | | PAVLQSSGLYSLSSVVTVPSSSLGTQTYICNVNHKPSNTKVDKKVEPKS | |
| | | CDKTHTCPPCPAPELLGPSVFLFPPKPKDTLMISRTPEVTCVVVDVSHE | |
| | | DPEVKFNWYVDGVEVHNAKTKPREEQYNSTYRVVSVLTVLHQDWLNGKE | |
| | | YKCKVSNKALPAPIEKTISKAKGQPREPQVYTLPPSREEMTKNQVSLTC | |
| | | LVKGFYPSDIAVEWESNGQPENNYKTTPPVLDSDGSFFLYSKLTVDKSR | |
| | | WQQGNVFSCSVMHEALHNHYTQKSLSLSPGK | |
| | 2^{nd} | EIVLTQSPATLSLSPGERATLSCRASSSVSYMHWYQQKPGQAPRPWIYA | 118 |
| | chain | TSNLASGIPARFSGSRSGTDYTLTISSLEPEDFAVYYCQQWSSNTLTFG | |
| | | GGTKVEIKRTVAAPSVFIFPPSDEQLKSGTASVVCLLNNFYPREAKVQW | |
| | | KVDNALQSGNSQESVTEQDSKDSTYSLSSTLTLSKADYEKHKVYACEVT | |
| | | HQGLSSPVTKSFNRGEC | |
| Ly1948 | 1^{st} | QVQLVQSGAEVKKPGASVKVSCKASGYTFTSYVMHWVRQKPGQGLEWIG | 119 |
| | chain | YINPYNEGTESTDKFKGRATMTSDKSTSTVYMELSSLRSEDTAVYYCAS | |
| | | IYYGYEGTYFGVWGQGTLVTVSSASTKGPSVFPLAPSSKSTSGGTAALG | |
| | | CLVKDYFPEPVTVSWNSGALTSGVHTFPAVLQSSGLYSLSSVVTVPSSS | |
| | | LGTQTYICNVNHKPSNTKVDKKVEPKSCDKTHTCPPCPAPELLGPSVFL | |
| | | FPPKPKDTLMISRTPEVTCVVVDVSHEDPEVKFNWYVDGVEVHNAKTKP | |
| | | REEQYNSTYRVVSVLTVLHQDWLNGKEYKCKVSNKALPAPIEKTISKAK | |
| | | GQPREPQVYTLPPCREEMTKNQVSLWCLVKGFYPSDIAVEWESNGQPEN | |
| | | NYKTTPPVLDSDGSFFLYSKLTVDKSRWQQGNVFSCSVMHEALHNHYTQ | |
| | | KSLSLSPGK | |
| | 2^{nd} | QVQLQESGPGLVKPSETLSLTCTVSGFSLTSYNVHWIRQPPGKGLEWIG | 120 |
| | chain | VIWSGVRTDYNSVLKPRVTISVDTSKNQFSLKLSSVTAADTAVYYCARG | |
| | | TYDDNYHDVMDAWGQGTLVTVSSASVAAPSVFIFPPSDEQLKSGTASVV | |
| | | CLLNNFYPREAKVQWKVDNALQSGNSQESVTEQDSKDSTYSLSSTLTLS | |
| | | KADYEKHKVYACEVTHQGLSSPVTKSFNRGECDKTHTCPPCPAPELLGP | |
| | | SVFLFPPKPKDTLMISRTPEVTCVVVDVSHEDPEVKFNWYVDGVEVHNA | |
| | | KTKPREEQYNSTYRVVSVLTVLHQDWLNGKEYKCKVSNKALPAPIEKTI | |
| | | SKAKGQPREPQVCTLPPSREEMTKNQVSLSCAVKGFYPSDIAVEWESNG | |
| | | QPENNYKTTPPVLDSDGSFFLVSKLTVDKSRWQQGNVFSCSVMHEALHN | |
| | | RFTQKSLSLSPGK | |
| | 3^{rd} | EIVLTQSPATLSLSPGERATLSCRASSSVSYMHWYQQKPGQAPRPWIYA | 121 |
| | chain | TSNLASGIPARFSGSRSGTDYTLTISSLEPEDFAVYYCQQWSSNTLTFG | |
| | | GGTKVEIKRTVAAPSVFIFPPSDEQLKSGTASVVCLLNNFYPREAKVQW | |
| | | KVDNALQSGNSQESVTEQDSKDSTYSLSSTLTLSKADYEKHKVYACEVT | |
| | | HQGLSSPVTKSFNRGEC | |
| | 4^{th} | EIVLTQSPATLSLSPGERATLSCRASKSVRTGMHWYQQKPGQAPRLLIY | 122 |
| | chain | GASNLESGIPARFSGSGSGTDFTLTISSLEPEDFAVYYCQQSWNHFTFG | |
| | | QGTKLEIKSSASTKGPSVFPLAPSSKSTSGGTAALGCLVKDYFPEPVTV | |
| | | SWNSGALTSGVHTFPAVLQSSGLYSLSSVVTVPSSSLGTQTYICNVNHK | |
| | | PSNTKVDKKVEPKSC | |
| Ly1949 | 1^{st} | QVQLVQSGAEVKKPGASVKVSCKASGYTFTSYVMHWVRQKPGQGLEWIG | 123 |
| | chain | YINPYNEGTESTDKFKGRATMTSDKSTSTVYMELSSLRSEDTAVYYCAS | |
| | | IYYGYEGTYFGVWGQGTLVTVSSASTKGPSVFPLAPSSKSTSGGTAALG | |
| | | CLVKDYFPEPVTVSWNSGALTSGVHTFPAVLQSSGLYSLSSVVTVPSSS | |
| | | LGTQTYICNVNHKPSNTKVDKKVEPKSCDKTHTCPPCPAPELLGPSVFL | |
| | | FPPKPKDTLMISRTPEVTCVVVDVSHEDPEVKFNWYVDGVEVHNAKTKP | |
| | | REEQYNSTYRVVSVLTVLHQDWLNGKEYKCKVSNKALPAPIEKTISKAK | |
| | | GQPREPQVYTDPPSREEMTKNQVSLTCEVKGFYPSDIAVEWESNGQPEN | |
| | | NYKTTPPVLDSDGSFFLYSKLTVDKSRWQQGNVFSCSVMHEALHNHYTQ | |
| | | KSLSLSPGK | |
| | 2^{nd} | QVQLQESGPGLVKPSETLSLTCTVSGFSLTSYNVHWIRQPPGKGLEWIG | 124 |
| | chain | VIWSGVRTDYNSVLKPRVTISVDTSKNQFSLKLSSVTAADTAVYYCARG | |
| | | TYDDNYHDVMDAWGQGTLVTVSSASVAAPSVFIFPPSDEQLKSGTASVV | |
| | | CLLNNFYPREAKVQWKVDNALQSGNSQESVTEQDSKDSTYSLSSTLTLS | |
| | | KADYEKHKVYACEVTHQGLSSPVTKSFNRGECDKTHTCPPCPAPELLGP | |
| | | SVFLFPPKPKDTLMISRTPEVTCVVVDVSHEDPEVKFNWYVDGVEVHNA | |
| | | KTKPREEQYNSTYRVVSVLTVLHQDWLNGKEYKCKVSNKALPAPIEKTI | |
| | | SKAKGQPREPQVYTKPPSREEMTKNQVSLTCKVKGFYPSDIAVEWESNG | |
| | | QPENNYKTTPPVLDSDGSFFLYSKLTVDKSRWQQGNVFSCSVMHEALHN | |
| | | RFTQKSLSLSPGK | |
| | 3^{rd} | EIVLTQSPATLSLSPGERATLSCRASSSVSYMHWYQQKPGQAPRPWIYA | 125 |
| | chain | TSNLASGIPARFSGSRSGTDYTLTISSLEPEDFAVYYCQQWSSNTLTFG | |
| | | GGTKVEIKRTVAAPSVFIFPPSDEQLKSGTASVVCLLNNFYPREAKVQW | |
| | | KVDNALQSGNSQESVTEQDSKDSTYSLSSTLTLSKADYEKHKVYACEVT | |
| | | HQGLSSPVTKSFNRGEC | |
| | 4^{th} | EIVLTQSPATLSLSPGERATLSCRASKSVRTGMHWYQQKPGQAPRLLIY | 126 |
| | chain | GASNLESGIPARFSGSGSGTDFTLTISSLEPEDFAVYYCQQSWNHFTFG | |
| | | QGTKLEIKSSASTKGPSVFPLAPSSKSTSGGTAALGCLVKDYFPEPVTV | |
| | | SWNSGALTSGVHTFPAVLQSSGLYSLSSVVTVPSSSLGTQTYICNVNHK | |
| | | PSNTKVDKKVEPKSC | |
| Ly1950 | 1^{st} | QVQLVQSGAEVKKPGASVKVSCKASGYTFTSYVMHWVRQKPGQGLEWIG | 127 |
| | chain | YINPYNEGTESTDKFKGRATMTSDKSTSTVYMELSSLRSEDTAVYYCAS | |
| | | IYYGYEGTYFGVWGQGTLVTVSSASTKGPSVFPLAPSSKSTSGGTAALG | |
| | | CLVKDYFPEPVTVSWNSGALTSGVHTFPAVLQSSGLYSLSSVVTVPSSS | |
| | | LGTQTYICNVNHKPSNTKVDKKVEPKSCDKTHTCPPCPAPELLGPSVFL | |
| | | FPPKPKDTLMISRTPEVTCVVVDVSHEDPEVKFNWYVDGVEVHNAKTKP | |
| | | REEQYNSTYRVVSVLTVLHQDWLNGKEYKCKVSNKALPAPIEKTISKAK | |
| | | GQPREPQVYVYPPSREEMTKNQVSLTCLVKGFYPSDIAVEWESNGQPEN | |
| | | NYKTTPPVLDSDGSFALVSKLTVDKSRWQQGNVFSCSVMHEALHNHYTQ | |
| | | KSLSLSPGK | |
| | 2^{nd} | QVQLQESGPGLVKPSETLSLTCTVSGFSLTSYNVHWIRQPPGKGLEWIG | 128 |
| | chain | VIWSGVRTDYNSVLKPRVTISVDTSKNQFSLKLSSVTAADTAVYYCARG | |
| | | TYDDNYHDVMDAWGQGTLVTVSSASVAAPSVFIFPPSDEQLKSGTASVV | |
| | | CLLNNFYPREAKVQWKVDNALQSGNSQESVTEQDSKDSTYSLSSTLTLS | |
| | | KADYEKHKVYACEVTHQGLSSPVTKSFNRGECDKTHTCPPCPAPELLGP | |
| | | SVFLFPPKPKDTLMISRTPEVTCVVVDVSHEDPEVKFNWYVDGVEVHNA | |
| | | KTKPREEQYNSTYRVVSVLTVLHQDWLNGKEYKCKVSNKALPAPIEKTI | |
| | | SKAKGQPREPQVYVLPPSREEMTKNQVSLLCLVKGFYPSDIAVEWESNG | |
| | | QPENNYLTWPPVLDSDGSFFLYSKLTVDKSRWQQGNVFSCSVMHEALHN | |
| | | RFTQKSLSLSPGK | |
| | 3^{rd} | EIVLTQSPATLSLSPGERATLSCRASSSVSYMHWYQQKPGQAPRPWIYA | 129 |
| | chain | TSNLASGIPARFSGSRSGTDYTLTISSLEPEDFAVYYCQQWSSNTLTFG | |
| | | GGTKVEIKRTVAAPSVFIFPPSDEQLKSGTASVVCLLNNFYPREAKVQW | |
| | | KVDNALQSGNSQESVTEQDSKDSTYSLSSTLTLSKADYEKHKVYACEVT | |
| | | HQGLSSPVTKSFNRGEC | |
| | 4^{th} | EIVLTQSPATLSLSPGERATLSCRASKSVRTGMHWYQQKPGQAPRLLIY | 130 |
| | chain | GASNLESGIPARFSGSGSGTDFTLTISSLEPEDFAVYYCQQSWNHFTFG | |
| | | QGTKLEIKSSASTKGPSVFPLAPSSKSTSGGTAALGCLVKDYFPEPVTV | |
| | | SWNSGALTSGVHTFPAVLQSSGLYSLSSVVTVPSSSLGTQTYICNVNHK | |
| | | PSNTKVDKKVEPKSC | |
| Ly1951 | 1^{st} | QVQLVQSGAEVKKPGASVKVSCKASGYTFTSYVMHWVRQKPGQGLEWIG | 131 |
| | chain | YINPYNEGTESTDKFKGRATMTSDKSTSTVYMELSSLRSEDTAVYYCAS | |
| | | IYYGYEGTYFGVWGQGTLVTVSSASTKGPSVFPLAPSSKSTSGGTAALG | |
| | | CLVKDYFPEPVTVSWNSGALTSGVHTFPAVLQSSGLYSLSSVVTVPSSS | |
| | | LGTQTYICNVNHKPSNTKVDKKVEPKSCDKTHTCPPCPAPELLGPSVFL | |
| | | FPPKPKDTLMISRTPEVTCVVVDVSHEDPEVKFNWYVDGVEVHNAKTKP | |
| | | REEQYNSTYRVVSVLTVLHQDWLNGKEYKCKVSNKALPAPIEKTISKAK | |
| | | GQPREPQVYTLPPCREEMTKNQVSLWCLVKGFYPSDIAVEWESNGQPEN | |
| | | NYKTTPPVLDSDGSFFLYSKLTVDKSRWQQGNVFSCSVMHEALHNHYTQ | |
| | | KSLSLSPGK | |
| | 2^{nd} | QVQLQESGPGLVKPSETLSLTCTVSGFSLTSYNVHWIRQPPGKGLEWIG | 132 |
| | chain | VIWSGVRTDYNSVLKPRVTISVDTSKNQFSLKLSSVTAADTAVYYCARG | |
| | | TYDDNYHDVMDAWGQGTLVTVSSDLKNVFPPEVAVFEPSEAEISHTQKA | |
| | | TLVCLATGFYPDHVELSWWVNGKEVHSGVCTDPQPLKEQPALQDSRYAL | |
| | | SSRLRVSATFWQNPRNHFRCQVQFYGLSENDEWTQDRAKPVTQIVSAEA | |
| | | WGRASDKTHTCPPCPAPELLGPSVFLFPPKPKDTLMISRTPEVTCVVVD | |
| | | VSHEDPEVKFNWYVDGVEVHNAKTKPREEQYNSTYRVVSVLTVLHQDWL | |
| | | NGKEYKCKVSNKALPAPIEKTISKAKGQPREPQVCTLPPSREEMTKNQV | |
| | | SLSCAVKGFYPSDIAVEWESNGQPENNYKTTPPVLDSDGSFFLVSKLTV | |
| | | DKSRWQQGNVFSCSVMHEALHNRFTQKSLSLSPGK | |
| | 3^{rd} | EIVLTQSPATLSLSPGERATLSCRASSSVSYMHWYQQKPGQAPRPWIYA | 133 |
| | chain | TSNLASGIPARFSGSRSGTDYTLTISSLEPEDFAVYYCQQWSSNTLTFG | |
| | | GGTKVEIKRTVAAPSVFIFPPSDEQLKSGTASVVCLLNNFYPREAKVQW | |
| | | KVDNALQSGNSQESVTEQDSKDSTYSLSSTLTLSKADYEKHKVYACEVT | |
| | | HQGLSSPVTKSFNRGEC | |
| | 4^{th} | EIVLTQSPATLSLSPGERATLSCRASKSVRTGMHWYQQKPGQAPRLLIY | 134 |
| | chain | GASNLESGIPARFSGSGSGTDFTLTISSLEPEDFAVYYCQQSWNHFTFG | |
| | | QGTKLEIKPDIQNPDPAVYQLRDSKSSDKSVCLFTDFDSQTQVSQSKDS | |
| | | DVYITDKCVLDMRSMDFKSNSAVAWSQKSDFACANAFQNSIIPEDTFFP | |
| | | SPESS | |
| Ly1952 | 1^{st} | QVQLVQSGAEVKKPGASVKVSCKASGYTFTSYVMHWVRQKPGQGLEWIG | 135 |
| | chain | YINPYNEGTESTDKFKGRATMTSDKSTSTVYMELSSLRSEDTAVYYCAS | |
| | | IYYGYEGTYFGVWGQGTLVTVSSASTKGPSVFPLAPSSKSTSGGTAALG | |
| | | CLVKDYFPEPVTVSWNSGALTSGVHTFPAVLQSSGLYSLSSVVTVPSSS | |
| | | LGTQTYICNVNHKPSNTKVDKKVEPKSCDKTHTCPPCPAPELLGPSVFL | |
| | | FPPKPKDTLMISRTPEVTCVVVDVSHEDPEVKFNWYVDGVEVHNAKTKP | |
| | | REEQYNSTYRVVSVLTVLHQDWLNGKEYKCKVSNKALPAPIEKTISKAK | |
| | | GQPREPQVYTLPPCREEMTKNQVSLWCLVKGFYPSDIAVEWESNGQPEN | |
| | | NYKTTPPVLDSDGSFFLYSKLTVDKSRWQQGNVFSCSVMHEALHNHYTQ | |
| | | KSLSLSPGK | |
| | 2^{nd} | QVQLVQSGAEVKKPGASVKVSCKASGYTFTSYVMHWVRQKPGQGLEWIG | 136 |
| | chain | YINPYNEGTESTDKFKGRATMTSDKSTSTVYMELSSLRSEDTAVYYCAS | |
| | | IYYGYEGTYFGVWGQGTLVTVSSASTKGPSVFPLAPSSKSTSGGTAALG | |
| | | CLVKDYFPEPVTVSWNSGALTSGVHTFPAVLQSSGLYSLSSVVTVPSSS | |
| | | LGTQTYICNVNHKPSNTKVDKKVEPKSCGGGGSGGGGSGGGGSGGGGSQ | |
| | | VQLQESGPGLVKPSETLSLTCTVSGFSLTSYNVHWIRQPPGKGLEWIGV | |
| | | IWSGVRTDYNSVLKPRVTISVDTSKNQFSLKLSSVTAADTAVYYCARGT | |
| | | YDDNYHDVMDAWGQGTLVTVSSDLKNVFPPEVAVFEPSEAEISHTQKAT | |
| | | LVCLATGFYPDHVELSWWVNGKEVHSGVCTDPQPLKEQPALQDSRYALS | |
| | | SRLRVSATFWQNPRNHFRCQVQFYGLSENDEWTQDRAKPVTQIVSAEAW | |
| | | GRASDKTHTCPPCPAPELLGPSVFLFPPKPKDTLMISRTPEVTCVVVDV | |
| | | SHEDPEVKFNWYVDGVEVHNAKTKPREEQYNSTYRVVSVLTVLHQDWLN | |
| | | GKEYKCKVSNKALPAPIEKTISKAKGQPREPQVYTLPPSREEMTKNQVS | |
| | | LSCAVKGFYPSDIAVEWESNGQPENNYKTTPPVLDSDGSFFLVSKLTVD | |
| | | KSRWQQGNVFSCSVMHEALHNRFTQKSLSLSPGK | |
| | 3^{rd} | EIVLTQSPATLSLSPGERATLSCRASSSVSYMHWYQQKPGQAPRPWIYA | 137 |
| | chain | TSNLASGIPARFSGSRSGTDYTLTISSLEPEDFAVYYCQQWSSNTLTFG | |
| | | GGTKVEIKRTVAAPSVFIFPPSDEQLKSGTASVVCLLNNFYPREAKVQW | |
| | | KVDNALQSGNSQESVTEQDSKDSTYSLSSTLTLSKADYEKHKVYACEVT | |
| | | HQGLSSPVTKSFNRGEC | |
| | 4^{th} | EIVLTQSPATLSLSPGERATLSCRASKSVRTGMHWYQQKPGQAPRLLIY | 138 |
| | chain | GASNLESGIPARFSGSGSGTDFTLTISSLEPEDFAVYYCQQSWNHFTFG | |
| | | QGTKLEIKPDIQNPDPAVYQLRDSKSSDKSVCLFTDFDSQTQVSQSKDS | |
| | | DVYITDKCVLDMRSMDFKSNSAVAWSQKSDFACANAFQNSIIPEDTFFP | |
| | | SPESS | |

### Characterization of Anti-B7H3/GITR Bi-Specific Antibodies

[0335] These bispecific antibodies are evaluated for their in vitro and in vivo activity, including binding to target antigen (B7H3 and GITR), agonistic activity in GITR reporter assay system, activation of immune cells, anti-tumor activity in mouse models.

### Example 6: Anti-B7H3/OX40 Bi-Specific Antibodies

[0336] Anti-B7H3/OX40 bi-specific antibodies were produced and characterized using parent anti-B7H3 antibody clone Ly1612 and parent anti-OX40 antibody clone Ly598 (OX40 Ab1). The amino acid sequences of the V_{H} and the V_{L} of the parent clones are provided in Table 1 above. The heavy chain and light chain complementary determining regions determined by the Kabat scheme are in boldface.

[0337] cDNAs encoding the heavy chain variable region (V_{H}) and the light chain variable region (V_{L}) of the parent clones were used as the starting materials for making these bi-specific antibodies. CHO-cell transient expression was carried out with plasmids configured for expressing the polypeptide chains of the bi-specific antibodies. These resultant bispecific antibodies were purified by protein A affinity chromatography.

[0338] The amino acid sequences of the polypeptides of exemplary bi-specific antibodies are provided in Table 6 below:

TABLE 6
Exemplary Anti-B7H3/OX40 Bi-Specific Antibodies

| | | | SED ID |
|---|---|---|---|
| Antibody Clones | | Amino acid sequence | NO: |
| Ly1953 | 1^{st} | QVQLVQSGAEVKKPGASVKVSCKASGYTFTSYVMHWVRQKPGQGLEWIG | 139 |
| | chain | YINPYNEGTESTDKFKGRATMTSDKSTSTVYMELSSLRSEDTAVYYCAS | |
| | | IYYGYEGTYFGVWGQGTLVTVSSASTKGPSVFPLAPSSKSTSGGTAALG | |
| | | CLVKDYFPEPVTVSWNSGALTSGVHTFPAVLQSSGLYSLSSVVTVPSSS | |
| | | LGTQTYICNVNHKPSNTKVDKKVEPKSCDKTHTCPPCPAPELLGPSVFL | |
| | | FPPKPKDTLMISRTPEVTCVVVDVSHEDPEVKFNWYVDGVEVHNAKTKP | |
| | | REEQYNSTYRVVSVLTVLHQDWLNGKEYKCKVSNKALPAPIEKTISKAK | |
| | | GQPREPQVYTLPPSREEMTKNQVSLTCLVKGFYPSDIAVEWESNGQPEN | |
| | | NYKTTPPVLDSDGSFFLYSKLTVDKSRWQQGNVFSCSVMHEALHNHYTQ | |
| | | KSLSLSPGGGGGSGGGGSGGGGSGGGGSDIQMTQSPSSLSASVGDRVTI | |
| | | TCRASQDISNYLNWYQQKPGKAPKLLIYYTSRLRSGVPSRFSGSGSGTD | |
| | | FTLTISSLQPEDFATYYCQQGHTLPPTFGQGTKVEIKGGGGSGGGGSGG | |
| | | GGSGGGGSEVQLVQSGAEVKKPGASVKVSCKASGYTFTDSYMSWVRQAP | |
| | | GQGLEWIGDMYPDNGDSSYNQKFRERVTITRDTSTSTAYLELSSLRSED | |
| | | TAVYYCVLAPRWYFSVWGQGTLVTVSS | |
| | 2^{nd} | EIVLTQSPATLSLSPGERATLSCRASSSVSYMHWYQQKPGQAPRPWIYA | 140 |
| | chain | TSNLASGIPARFSGSRSGTDYTLTISSLEPEDFAVYYCQQWSSNTLTFG | |
| | | GGTKVEIKRTVAAPSVFIFPPSDEQLKSGTASVVCLLNNFYPREAKVQW | |
| | | KVDNALQSGNSQESVTEQDSKDSTYSLSSTLTLSKADYEKHKVYACEVT | |
| | | HQGLSSPVTKSFNRGEC | |
| Ly1954 | 1^{st} | QVQLVQSGAEVKKPGASVKVSCKASGYTFTSYVMHWVRQKPGQGLEWIG | 141 |
| | chain | YINPYNEGTESTDKFKGRATMTSDKSTSTVYMELSSLRSEDTAVYYCAS | |
| | | IYYGYEGTYFGVWGQGTLVTVSSASTKGPSVFPLAPSSKSTSGGTAALG | |
| | | CLVKDYFPEPVTVSWNSGALTSGVHTFPAVLQSSGLYSLSSVVTVPSSS | |
| | | LGTQTYICNVNHKPSNTKVDKKVEPKSCDKTHTCPPCPAPELLGPSVFL | |
| | | FPPKPKDTLMISRTPEVTCVVVDVSHEDPEVKFNWYVDGVEVHNAKTKP | |
| | | REEQYNSTYRVVSVLTVLHQDWLNGKEYKCKVSNKALPAPIEKTISKAK | |
| | | GQPREPQVYTLPPSREEMTKNQVSLTCLVKGFYPSDIAVEWESNGQPEN | |
| | | NYKTTPPVLDSDGSFFLYSKLTVDKSRWQQGNVFSCSVMHEALHNHYTQ | |
| | | KSLSLSPGK | |
| | 2^{nd} | EIVLTQSPATLSLSPGERATLSCRASSSVSYMHWYQQKPGQAPRPWIYA | 142 |
| | chain | TSNLASGIPARFSGSRSGTDYTLTISSLEPEDFAVYYCQQWSSNTLTFG | |
| | | GGTKVEIKRTVAAPSVFIFPPSDEQLKSGTASVVCLLNNFYPREAKVQW | |
| | | KVDNALQSGNSQESVTEQDSKDSTYSLSSTLTLSKADYEKHKVYACEVT | |
| | | HQGLSSPVTKSFNRGECGGGGSGGGGSGGGGSGGGGSDIQMTQSPSSLS | |
| | | ASVGDRVTITCRASQDISNYLNWYQQKPGKAPKLLIYYTSRLRSGVPSR | |
| | | FSGSGSGTDFTLTISSLQPEDFATYYCQQGHTLPPTFGQGTKVEIKGGG | |
| | | GSGGGGSGGGGSGGGGSEVQLVQSGAEVKKPGASVKVSCKASGYTFTDS | |
| | | YMSWVRQAPGQGLEWIGDMYPDNGDSSYNQKFRERVTITRDTSTSTAYL | |
| | | ELSSLRSEDTAVYYCVLAPRWYFSVWGQGTLVTVSS | |
| Ly1955 | 1^{st} | DIQMTQSPSSLSASVGDRVTITCRASQDISNYLNWYQQKPGKAPKLLIY | 143 |
| | chain | YTSRLRSGVPSRFSGSGSGTDFTLTISSLQPEDFATYYCQQGHTLPPTF | |
| | | GQGTKVEIKGGGGSGGGGSGGGGSGGGGSEVQLVQSGAEVKKPGASVKV | |
| | | SCKASGYTFTDSYMSWVRQAPGQGLEWIGDMYPDNGDSSYNQKFRERVT | |
| | | ITRDTSTSTAYLELSSLRSEDTAVYYCVLAPRWYFSVWGQGTLVTVSSG | |
| | | GGGSGGGGSGGGGSGGGGSQVQLVQSGAEVKKPGASVKVSCKASGYTFT | |
| | | SYVMHWVRQKPGQGLEWIGYINPYNEGTESTDKFKGRATMTSDKSTSTV | |
| | | YMELSSLRSEDTAVYYCASIYYGYEGTYFGVWGQGTLVTVSSASTKGPS | |
| | | VFPLAPSSKSTSGGTAALGCLVKDYFPEPVTVSWNSGALTSGVHTFPAV | |
| | | LQSSGLYSLSSVVTVPSSSLGTQTYICNVNHKPSNTKVDKKVEPKSCDK | |
| | | THTCPPCPAPELLGPSVFLFPPKPKDTLMISRTPEVTCVVVDVSHEDPE | |
| | | VKFNWYVDGVEVHNAKTKPREEQYNSTYRVVSVLTVLHQDWLNGKEYKC | |
| | | KVSNKALPAPIEKTISKAKGQPREPQVYTLPPSREEMTKNQVSLTCLVK | |
| | | GFYPSDIAVEWESNGQPENNYKTTPPVLDSDGSFFLYSKLTVDKSRWQQ | |
| | | GNVFSCSVMHEALHNHYTQKSLSLSPGK | |
| | 2^{nd} | EIVLTQSPATLSLSPGERATLSCRASSSVSYMHWYQQKPGQAPRPWIYA | 144 |
| | chain | TSNLASGIPARFSGSRSGTDYTLTISSLEPEDFAVYYCQQWSSNTLTFG | |
| | | GGTKVEIKRTVAAPSVFIFPPSDEQLKSGTASVVCLLNNFYPREAKVQW | |
| | | KVDNALQSGNSQESVTEQDSKDSTYSLSSTLTLSKADYEKHKVYACEVT | |
| | | HQGLSSPVTKSFNRGEC | |
| Ly1956 | 1^{st} | QVQLVQSGAEVKKPGASVKVSCKASGYTFTSYVMHWVRQKPGQGLEWIG | 145 |
| | chain | YINPYNEGTESTDKFKGRATMTSDKSTSTVYMELSSLRSEDTAVYYCAS | |
| | | IYYGYEGTYFGVWGQGTLVTVSSASTKGPSVFPLAPSSKSTSGGTAALG | |
| | | CLVKDYFPEPVTVSWNSGALTSGVHTFPAVLQSSGLYSLSSVVTVPSSS | |
| | | LGTQTYICNVNHKPSNTKVDKKVEPKSCDKTHTCPPCPAPELLGPSVFL | |
| | | FPPKPKDTLMISRTPEVTCVVVDVSHEDPEVKFNWYVDGVEVHNAKTKP | |
| | | REEQYNSTYRVVSVLTVLHQDWLNGKEYKCKVSNKALPAPIEKTISKAK | |
| | | GQPREPQVYTLPPCREEMTKNQVSLWCLVKGFYPSDIAVEWESNGQPEN | |
| | | NYKTTPPVLDSDGSFFLYSKLTVDKSRWQQGNVFSCSVMHEALHNHYTQ | |
| | | KSLSLSPGK | |
| | 2^{nd} | EVQLVQSGAEVKKPGASVKVSCKASGYTFTDSYMSWVRQAPGQGLEWIG | 146 |
| | chain | DMYPDNGDSSYNQKFRERVTITRDTSTSTAYLELSSLRSEDTAVYYCVL | |
| | | APRWYFSVWGQGTLVTVSSASVAAPSVFIFPPSDEQLKSGTASVVCLLN | |
| | | NFYPREAKVQWKVDNALQSGNSQESVTEQDSKDSTYSLSSTLILSKADY | |
| | | EKHKVYACEVTHQGLSSPVTKSFNRGECDKTHTCPPCPAPELLGPSVFL | |
| | | FPPKPKDTLMISRTPEVTCVVVDVSHEDPEVKFNWYVDGVEVHNAKTKP | |
| | | REEQYNSTYRVVSVLTVLHQDWLNGKEYKCKVSNKALPAPIEKTISKAK | |
| | | GQPREPQVCTLPPSREEMTKNQVSLSCAVKGFYPSDIAVEWESNGQPEN | |
| | | NYKTTPPVLDSDGSFFLVSKLTVDKSRWQQGNVFSCSVMHEALHNRFTQ | |
| | | KSLSLSPGK | |
| | 3^{rd} | EIVLTQSPATLSLSPGERATLSCRASSSVSYMHWYQQKPGQAPRPWIYA | 147 |
| | chain | TSNLASGIPARFSGSRSGTDYTLTISSLEPEDFAVYYCQQWSSNTLTFG | |
| | | GGTKVEIKRTVAAPSVFIFPPSDEQLKSGTASVVCLLNNFYPREAKVQW | |
| | | KVDNALQSGNSQESVTEQDSKDSTYSLSSTLTLSKADYEKHKVYACEVT | |
| | | HQGLSSPVTKSFNRGEC | |
| | 4^{th} | DIQMTQSPSSLSASVGDRVTITCRASQDISNYLNWYQQKPGKAPKLLIY | 148 |
| | chain | YTSRLRSGVPSRFSGSGSGTDFTLTISSLQPEDFATYYCQQGHTLPPTF | |
| | | GQGTKVEIKSSASTKGPSVFPLAPSSKSTSGGTAALGCLVKDYFPEPVT | |
| | | VSWNSGALTSGVHTFPAVLQSSGLYSLSSVVTVPSSSLGTQTYICNVNH | |
| | | KPSNTKVDKKVEPKSC | |
| Ly1957 | 1^{st} | QVQLVQSGAEVKKPGASVKVSCKASGYTFTSYVMHWVRQKPGQGLEWIG | 149 |
| | chain | YINPYNEGTESTDKFKGRATMTSDKSTSTVYMELSSLRSEDTAVYYCAS | |
| | | IYYGYEGTYFGVWGQGTLVTVSSASTKGPSVFPLAPSSKSTSGGTAALG | |
| | | CLVKDYFPEPVTVSWNSGALTSGVHTFPAVLQSSGLYSLSSVVTVPSSS | |
| | | LGTQTYICNVNHKPSNTKVDKKVEPKSCDKTHTCPPCPAPELLGPSVFL | |
| | | FPPKPKDTLMISRTPEVTCVVVDVSHEDPEVKFNWYVDGVEVHNAKTKP | |
| | | REEQYNSTYRVVSVLTVLHQDWLNGKEYKCKVSNKALPAPIEKTISKAK | |
| | | GQPREPQVYTDPPSREEMTKNQVSLTCEVKGFYPSDIAVEWESNGQPEN | |
| | | NYKTTPPVLDSDGSFFLYSKLTVDKSRWQQGNVFSCSVMHEALHNHYTQ | |
| | | KSLSLSPGK | |
| | 2^{nd} | EVQLVQSGAEVKKPGASVKVSCKASGYTFTDSYMSWVRQAPGQGLEWIG | 150 |
| | chain | DMYPDNGDSSYNQKFRERVTITRDTSTSTAYLELSSLRSEDTAVYYCVL | |
| | | APRWYFSVWGQGTLVTVSSASVAAPSVFIFPPSDEQLKSGTASVVCLLN | |
| | | NFYPREAKVQWKVDNALQSGNSQESVTEQDSKDSTYSLSSTLTLSKADY | |
| | | EKHKVYACEVTHQGLSSPVTKSFNRGECDKTHTCPPCPAPELLGPSVEL | |
| | | FPPKPKDTLMISRTPEVTCVVVDVSHEDPEVKFNWYVDGVEVHNAKTKP | |
| | | REEQYNSTYRVVSVLTVLHQDWLNGKEYKCKVSNKALPAPIEKTISKAK | |
| | | GQPREPQVYTKPPSREEMTKNQVSLTCKVKGFYPSDIAVEWESNGQPEN | |
| | | NYKTTPPVLDSDGSFFLYSKLTVDKSRWQQGNVFSCSVMHEALHNRFTQ | |
| | | KSLSLSPGK | |
| | 3^{rd} | EIVLTQSPATLSLSPGERATLSCRASSSVSYMHWYQQKPGQAPRPWIYA | 151 |
| | chain | TSNLASGIPARFSGSRSGTDYTLTISSLEPEDFAVYYCQQWSSNTLTFG | |
| | | GGTKVEIKRTVAAPSVFIFPPSDEQLKSGTASVVCLLNNFYPREAKVQW | |
| | | KVDNALQSGNSQESVTEQDSKDSTYSLSSTLTLSKADYEKHKVYACEVT | |
| | | HQGLSSPVTKSFNRGEC | |
| | 4^{th} | DIQMTQSPSSLSASVGDRVTITCRASQDISNYLNWYQQKPGKAPKLLIY | 152 |
| | chain | YTSRLRSGVPSRFSGSGSGTDFTLTISSLQPEDFATYYCQQGHTLPPTF | |
| | | GQGTKVEIKSSASTKGPSVFPLAPSSKSTSGGTAALGCLVKDYFPEPVT | |
| | | VSWNSGALTSGVHTFPAVLQSSGLYSLSSVVTVPSSSLGTQTYICNVNH | |
| | | KPSNTKVDKKVEPKSC | |
| Ly1958 | 1^{st} | QVQLVQSGAEVKKPGASVKVSCKASGYTFTSYVMHWVRQKPGQGLEWIG | 153 |
| | chain | YINPYNEGTESTDKFKGRATMTSDKSTSTVYMELSSLRSEDTAVYYCAS | |
| | | IYYGYEGTYFGVWGQGTLVTVSSASTKGPSVFPLAPSSKSTSGGTAALG | |
| | | CLVKDYFPEPVTVSWNSGALTSGVHTFPAVLQSSGLYSLSSVVTVPSSS | |
| | | LGTQTYICNVNHKPSNTKVDKKVEPKSCDKTHTCPPCPAPELLGPSVFL | |
| | | FPPKPKDTLMISRTPEVTCVVVDVSHEDPEVKFNWYVDGVEVHNAKTKP | |
| | | REEQYNSTYRVVSVLTVLHQDWLNGKEYKCKVSNKALPAPIEKTISKAK | |
| | | GQPREPQVYVYPPSREEMTKNQVSLTCLVKGFYPSDIAVEWESNGQPEN | |
| | | NYKTTPPVLDSDGSFALVSKLTVDKSRWQQGNVFSCSVMHEALHNHYTQ | |
| | | KSLSLSPGK | |
| | 2^{nd} | EVQLVQSGAEVKKPGASVKVSCKASGYTFTDSYMSWVRQAPGQGLEWIG | 154 |
| | chain | DMYPDNGDSSYNQKFRERVTITRDTSTSTAYLELSSLRSEDTAVYYCVL | |
| | | APRWYFSVWGQGTLVTVSSASVAAPSVFIFPPSDEQLKSGTASVVCLLN | |
| | | NFYPREAKVQWKVDNALQSGNSQESVTEQDSKDSTYSLSSTLTLSKADY | |
| | | EKHKVYACEVTHQGLSSPVTKSFNRGECDKTHTCPPCPAPELLGPSVFL | |
| | | FPPKPKDTLMISRTPEVTCVVVDVSHEDPEVKFNWYVDGVEVHNAKTKP | |
| | | REEQYNSTYRVVSVLTVLHQDWLNGKEYKCKVSNKALPAPIEKTISKAK | |
| | | GQPREPQVYVLPPSREEMTKNQVSLLCLVKGFYPSDIAVEWESNGQPEN | |
| | | NYLTWPPVLDSDGSFFLYSKLTVDKSRWQQGNVFSCSVMHEALHNRFTQ | |
| | | KSLSLSPGK | |
| | 3^{rd} | EIVLTQSPATLSLSPGERATLSCRASSSVSYMHWYQQKPGQAPRPWIYA | 155 |
| | chain | TSNLASGIPARFSGSRSGTDYTLTISSLEPEDFAVYYCQQWSSNTLTFG | |
| | | GGTKVEIKRTVAAPSVFIFPPSDEQLKSGTASVVCLLNNFYPREAKVQW | |
| | | KVDNALQSGNSQESVTEQDSKDSTYSLSSTLTLSKADYEKHKVYACEVT | |
| | | HQGLSSPVTKSFNRGEC | |
| | 4^{th} | DIQMTQSPSSLSASVGDRVTITCRASQDISNYLNWYQQKPGKAPKLLIY | 156 |
| | chain | YTSRLRSGVPSRFSGSGSGTDFTLTISSLQPEDFATYYCQQGHTLPPTF | |
| | | GQGTKVEIKSSASTKGPSVFPLAPSSKSTSGGTAALGCLVKDYFPEPVT | |
| | | VSWNSGALTSGVHTFPAVLQSSGLYSLSSVVTVPSSSLGTQTYICNVNH | |
| | | KPSNTKVDKKVEPKSC | |
| Ly1959 | 1^{st} | QVQLVQSGAEVKKPGASVKVSCKASGYTFTSYVMHWVRQKPGQGLEWIG | 157 |
| | chain | YINPYNEGTESTDKFKGRATMTSDKSTSTVYMELSSLRSEDTAVYYCAS | |
| | | IYYGYEGTYFGVWGQGTLVTVSSASTKGPSVFPLAPSSKSTSGGTAALG | |
| | | CLVKDYFPEPVTVSWNSGALTSGVHTFPAVLQSSGLYSLSSVVTVPSSS | |
| | | LGTQTYICNVNHKPSNTKVDKKVEPKSCDKTHTCPPCPAPELLGPSVFL | |
| | | FPPKPKDTLMISRTPEVTCVVVDVSHEDPEVKFNWYVDGVEVHNAKTKP | |
| | | REEQYNSTYRVVSVLTVLHQDWLNGKEYKCKVSNKALPAPIEKTISKAK | |
| | | GQPREPQVYTLPPCREEMTKNQVSLWCLVKGFYPSDIAVEWESNGQPEN | |
| | | NYKTTPPVLDSDGSFFLYSKLTVDKSRWQQGNVFSCSVMHEALHNHYTQ | |
| | | KSLSLSPGK | |
| | 2^{nd} | EVQLVQSGAEVKKPGASVKVSCKASGYTFTDSYMSWVRQAPGQGLEWIG | 158 |
| | chain | DMYPDNGDSSYNQKFRERVTITRDTSTSTAYLELSSLRSEDTAVYYCVL | |
| | | APRWYFSVWGQGTLVTVSSDLKNVFPPEVAVFEPSEAEISHTQKATLVC | |
| | | LATGFYPDHVELSWWVNGKEVHSGVCTDPQPLKEQPALQDSRYALSSRL | |
| | | RVSATFWQNPRNHFRCQVQFYGLSENDEWTQDRAKPVTQIVSAEAWGRA | |
| | | SDKTHTCPPCPAPELLGPSVFLFPPKPKDTLMISRTPEVTCVVVDVSHE | |
| | | DPEVKFNWYVDGVEVHNAKTKPREEQYNSTYRVVSVLTVLHQDWLNGKE | |
| | | YKCKVSNKALPAPIEKTISKAKGQPREPQVCTLPPSREEMTKNQVSLSC | |
| | | AVKGFYPSDIAVEWESNGQPENNYKTTPPVLDSDGSFFLVSKLTVDKSR | |
| | | WQQGNVFSCSVMHEALHNRFTQKSLSLSPGK | |
| | 3^{rd} | EIVLTQSPATLSLSPGERATLSCRASSSVSYMHWYQQKPGQAPRPWIYA | 159 |
| | chain | TSNLASGIPARFSGSRSGTDYTLTISSLEPEDFAVYYCQQWSSNTLTFG | |
| | | GGTKVEIKRTVAAPSVFIFPPSDEQLKSGTASVVCLLNNFYPREAKVQW | |
| | | KVDNALQSGNSQESVTEQDSKDSTYSLSSTLTLSKADYEKHKVYACEVT | |
| | | HQGLSSPVTKSFNRGEC | |
| | 4^{th} | DIQMTQSPSSLSASVGDRVTITCRASQDISNYLNWYQQKPGKAPKLLIY | 160 |
| | chain | YTSRLRSGVPSRFSGSGSGTDFTLTISSLQPEDFATYYCQQGHTLPPTF | |
| | | GQGTKVEIKPDIQNPDPAVYQLRDSKSSDKSVCLFTDFDSQTQVSQSKD | |
| | | SDVYITDKCVLDMRSMDFKSNSAVAWSQKSDFACANAFQNSIIPEDTFF | |
| | | PSPESS | |
| Ly1960 | 1^{st} | QVQLVQSGAEVKKPGASVKVSCKASGYTFTSYVMHWVRQKPGQGLEWIG | 161 |
| | chain | YINPYNEGTESTDKFKGRATMTSDKSTSTVYMELSSLRSEDTAVYYCAS | |
| | | IYYGYEGTYFGVWGQGTLVTVSSASTKGPSVFPLAPSSKSTSGGTAALG | |
| | | CLVKDYFPEPVTVSWNSGALTSGVHTFPAVLQSSGLYSLSSVVTVPSSS | |
| | | LGTQTYICNVNHKPSNTKVDKKVEPKSCDKTHTCPPCPAPELLGPSVFL | |
| | | FPPKPKDTLMISRTPEVTCVVVDVSHEDPEVKFNWYVDGVEVHNAKTKP | |
| | | REEQYNSTYRVVSVLTVLHQDWLNGKEYKCKVSNKALPAPIEKTISKAK | |
| | | GQPREPQVYTLPPCREEMTKNQVSLWCLVKGFYPSDIAVEWESNGQPEN | |
| | | NYKTTPPVLDSDGSFFLYSKLTVDKSRWQQGNVFSCSVMHEALHNHYTQ | |
| | | KSLSLSPGK | |
| | 2^{nd} | QVQLVQSGAEVKKPGASVKVSCKASGYTFTSYVMHWVRQKPGQGLEWIG | 162 |
| | chain | YINPYNEGTESTDKFKGRATMTSDKSTSTVYMELSSLRSEDTAVYYCAS | |
| | | IYYGYEGTYFGVWGQGTLVTVSSASTKGPSVFPLAPSSKSTSGGTAALG | |
| | | CLVKDYFPEPVTVSWNSGALTSGVHTFPAVLQSSGLYSLSSVVTVPSSS | |
| | | LGTQTYICNVNHKPSNTKVDKKVEPKSCGGGGSGGGGSGGGGSGGGGSE | |
| | | VQLVQSGAEVKKPGASVKVSCKASGYTFTDSYMSWVRQAPGQGLEWIGD | |
| | | MYPDNGDSSYNQKFRERVTITRDTSTSTAYLELSSLRSEDTAVYYCVLA | |
| | | PRWYFSVWGQGTLVTVSSDLKNVFPPEVAVFEPSEAEISHTQKATLVCL | |
| | | ATGFYPDHVELSWWVNGKEVHSGVCTDPQPLKEQPALQDSRYALSSRLR | |
| | | VSATFWQNPRNHERCQVQFYGLSENDEWTQDRAKPVTQIVSAEAWGRAS | |
| | | DKTHTCPPCPAPELLGPSVFLFPPKPKDTLMISRTPEVTCVVVDVSHED | |
| | | PEVKFNWYVDGVEVHNAKTKPREEQYNSTYRVVSVLTVLHQDWLNGKEY | |
| | | KCKVSNKALPAPIEKTISKAKGQPREPQVYTLPPSREEMTKNQVSLSCA | |
| | | VKGFYPSDIAVEWESNGQPENNYKTTPPVLDSDGSFFLVSKLTVDKSRW | |
| | | QQGNVFSCSVMHEALHNRFTQKSLSLSPGK | |
| | 3^{rd} | EIVLTQSPATLSLSPGERATLSCRASSSVSYMHWYQQKPGQAPRPWIYA | 163 |
| | chain | TSNLASGIPARFSGSRSGTDYTLTISSLEPEDFAVYYCQQWSSNTLTFG | |
| | | GGTKVEIKRTVAAPSVFIFPPSDEQLKSGTASVVCLLNNFYPREAKVQW | |
| | | KVDNALQSGNSQESVTEQDSKDSTYSLSSTLTLSKADYEKHKVYACEVT | |
| | | HQGLSSPVTKSFNRGEC | |
| | 4^{th} | DIQMTQSPSSLSASVGDRVTITCRASQDISNYLNWYQQKPGKAPKLLIY | 164 |
| | chain | YTSRLRSGVPSRFSGSGSGTDFTLTISSLQPEDFATYYCQQGHTLPPTF | |
| | | GQGTKVEIKPDIQNPDPAVYQLRDSKSSDKSVCLFTDFDSQTQVSQSKD | |
| | | SDVYITDKCVLDMRSMDFKSNSAVAWSQKSDFACANAFQNSIIPEDTFF | |
| | | PSPESS | |

### Characterization of Anti-B7H3/OX40 Bi-Specific Antibodies

[0339] These bispecific antibodies are evaluated for their in vitro and in vivo activity, including binding to target antigen (B7H3 and OX40), agonistic activity in OX40 reporter assay system, activation of immune cells, anti-tumor activity in mouse models.

### Example 7: Anti-B7H3/CD47 Bi-Specific Antibodies

[0340] Anti-B7H3/CD47 bi-specific antibodies were produced using the parent anti-B7H3 antibodies Ly1612 (B7H3 Ab1) and anti-CD47 antibodies including Ly1667 (CD47 Ab1) and Ly1668 (CD47 Ab2). The V_{H} and V_{L} sequences of the parent antibodies are provided in Table 1 above (CDRs determined pursuant to the Kabat scheme are in boldface)

[0341] cDNAs encoding the V_{H} and V_{L} chains of both of the parent antibodies were used as the starting materials for constructing anti-B7H3/CD47 bispecific antibodies. CHO-cell transient expression was carried out with plasmids configured for expressing polypeptide chains of the bi-specific antibodies. These antibodies were purified by protein A affinity chromatography.

[0342] The amino acid sequences of the exemplary anti-B7H3/CD47 bispecific antibodies are provided in Table 7 below:

TABLE 7
Exemplary Anti-B7H3/CD47 Bi-Specific Antibodies

| | | | SED ID |
|---|---|---|---|
| Antibody Clones | | Amino acid sequence | NO: |
| Ly2043 | 1^{st} | QVQLVQSGAEVKKPGASVKVSCKASGYTFTSYVMHWVRQKPGQGLEWIG | 165 |
| | chain | YINPYNEGTESTDKFKGRATMTSDKSTSTVYMELSSLRSEDTAVYYCAS | |
| | | IYYGYEGTYFGVWGQGTLVTVSSASTKGPSVFPLAPSSKSTSGGTAALG | |
| | | CLVKDYFPEPVTVSWNSGALTSGVHTFPAVLQSSGLYSLSSVVTVPSSS | |
| | | LGTQTYICNVNHKPSNTKVDKKVEPKSCDKTHTCPPCPAPELLGPSVFL | |
| | | FPPKPKDTLMISRTPEVTCVVVDVSHEDPEVKFNWYVDGVEVHNAKTKP | |
| | | REEQYNSTYRVVSVLTVLHQDWLNGKEYKCKVSNKALPAPIEKTISKAK | |
| | | GQPREPQVYTLPPSREEMTKNQVSLTCLVKGFYPSDIAVEWESNGQPEN | |
| | | NYKTTPPVLDSDGSFFLYSKLTVDKSRWQQGNVFSCSVMHEALHNHYTQ | |
| | | KSLSLSPGGGGGSGGGGSGGGGSGGGGSDIVMTQSPLSLPVTPGEPASI | |
| | | SCRSSQSIVYSNGNTYLGWYLQKPGQSPQLLIYKVSNRFSGVPDRESGS | |
| | | GSGTDFTLKISRVEAEDVGVYYCFQGSHVPYTFGQGTKLEIKGGGGSGG | |
| | | GGSGGGGSGGGGSQVQLVQSGAEVKKPGASVKVSCKASGYTFTNYNMHW | |
| | | VRQAPGQRLEWMGTIYPGNDDTSYNQKFKDRVTITADTSASTAYMELSS | |
| | | LRSEDTAVYYCARGGYRAMDYWGQGTLVTVSS | |
| | 2^{nd} | EIVLTQSPATLSLSPGERATLSCRASSSVSYMHWYQQKPGQAPRPWIYA | 166 |
| | chain | TSNLASGIPARFSGSRSGTDYTLTISSLEPEDFAVYYCQQWSSNTLTFG | |
| | | GGTKVEIKRTVAAPSVFIFPPSDEQLKSGTASVVCLLNNFYPREAKVQW | |
| | | KVDNALQSGNSQESVTEQDSKDSTYSLSSTLTLSKADYEKHKVYACEVT | |
| | | HQGLSSPVTKSFNRGEC | |
| Ly2044 | 1^{st} | QVQLVQSGAEVKKPGASVKVSCKASGYTFTSYVMHWVRQKPGQGLEWIG | 167 |
| | chain | YINPYNEGTESTDKFKGRATMTSDKSTSTVYMELSSLRSEDTAVYYCAS | |
| | | IYYGYEGTYFGVWGQGTLVTVSSASTKGPSVFPLAPSSKSTSGGTAALG | |
| | | CLVKDYFPEPVTVSWNSGALTSGVHTFPAVLQSSGLYSLSSVVTVPSSS | |
| | | LGTQTYICNVNHKPSNTKVDKKVEPKSCDKTHTCPPCPAPELLGPSVFL | |
| | | FPPKPKDTLMISRTPEVTCVVVDVSHEDPEVKFNWYVDGVEVHNAKTKP | |
| | | REEQYNSTYRVVSVLTVLHQDWLNGKEYKCKVSNKALPAPIEKTISKAK | |
| | | GQPREPQVYTLPPSREEMTKNQVSLTCLVKGFYPSDIAVEWESNGQPEN | |
| | | NYKTTPPVLDSDGSFFLYSKLTVDKSRWQQGNVFSCSVMHEALHNHYTQ | |
| | | KSLSLSPGGGGGSGGGGSGGGGSGGGGSQVQLVQSGAEVKKPGASVKVS | |
| | | CKASGYTFTNYNMHWVRQAPGQRLEWMGTIYPGNDDTSYNQKFKDRVTI | |
| | | TADTSASTAYMELSSLRSEDTAVYYCARGGYRAMDYWGQGTLVTVSSGG | |
| | | GGSGGGGSGGGGSGGGGSDIVMTQSPLSLPVTPGEPASISCRSSQSIVY | |
| | | SNGNTYLGWYLQKPGQSPQLLIYKVSNRFSGVPDRFSGSGSGTDFTLKI | |
| | | SRVEAEDVGVYYCFQGSHVPYTFGQGTKLEIK | |
| | 2^{nd} | EIVLTQSPATLSLSPGERATLSCRASSSVSYMHWYQQKPGQAPRPWIYA | 168 |
| | chain | TSNLASGIPARFSGSRSGTDYTLTISSLEPEDFAVYYCQQWSSNTLTFG | |
| | | GGTKVEIKRTVAAPSVFIFPPSDEQLKSGTASVVCLLNNFYPREAKVQW | |
| | | KVDNALQSGNSQESVTEQDSKDSTYSLSSTLTLSKADYEKHKVYACEVT | |
| | | HQGLSSPVTKSFNRGEC | |
| Ly2045 | 1^{st} | QVQLVQSGAEVKKPGASVKVSCKASGYTFTSYVMHWVRQKPGQGLEWIG | 169 |
| | chain | YINPYNEGTESTDKFKGRATMTSDKSTSTVYMELSSLRSEDTAVYYCAS | |
| | | IYYGYEGTYFGVWGQGTLVTVSSASTKGPSVFPLAPSSKSTSGGTAALG | |
| | | CLVKDYFPEPVTVSWNSGALTSGVHTFPAVLQSSGLYSLSSVVTVPSSS | |
| | | LGTQTYICNVNHKPSNTKVDKKVEPKSCDKTHTCPPCPAPELLGPSVFL | |
| | | FPPKPKDTLMISRTPEVTCVVVDVSHEDPEVKFNWYVDGVEVHNAKTKP | |
| | | REEQYNSTYRVVSVLTVLHQDWLNGKEYKCKVSNKALPAPIEKTISKAK | |
| | | GQPREPQVYTLPPSREEMTKNQVSLTCLVKGFYPSDIAVEWESNGQPEN | |
| | | NYKTTPPVLDSDGSFFLYSKLTVDKSRWQQGNVFSCSVMHEALHNHYTQ | |
| | | KSLSLSPGK | |
| | 2^{nd} | EIVLTQSPATLSLSPGERATLSCRASSSVSYMHWYQQKPGQAPRPWIYA | 170 |
| | chain | TSNLASGIPARFSGSRSGTDYTLTISSLEPEDFAVYYCQQWSSNTLTFG | |
| | | GGTKVEIKRTVAAPSVFIFPPSDEQLKSGTASVVCLLNNFYPREAKVQW | |
| | | KVDNALQSGNSQESVTEQDSKDSTYSLSSTLTLSKADYEKHKVYACEVT | |
| | | HQGLSSPVTKSFNRGECGGGGSGGGGSGGGGSGGGGSDIVMTQSPLSLP | |
| | | VTPGEPASISCRSSQSIVYSNGNTYLGWYLQKPGQSPQLLIYKVSNRFS | |
| | | GVPDRFSGSGSGTDFTLKISRVEAEDVGVYYCFQGSHVPYTFGQGTKLE | |
| | | IKGGGGSGGGGSGGGGSGGGGSQVQLVQSGAEVKKPGASVKVSCKASGY | |
| | | TFTNYNMHWVRQAPGQRLEWMGTIYPGNDDTSYNQKFKDRVTITADTSA | |
| | | STAYMELSSLRSEDTAVYYCARGGYRAMDYWGQGTLVTVSS | |
| Ly2046 | 1^{st} | QVQLVQSGAEVKKPGASVKVSCKASGYTFTSYVMHWVRQKPGQGLEWIG | 171 |
| | chain | YINPYNEGTESTDKFKGRATMTSDKSTSTVYMELSSLRSEDTAVYYCAS | |
| | | IYYGYEGTYFGVWGQGTLVTVSSASTKGPSVFPLAPSSKSTSGGTAALG | |
| | | CLVKDYFPEPVTVSWNSGALTSGVHTFPAVLQSSGLYSLSSVVTVPSSS | |
| | | LGTQTYICNVNHKPSNTKVDKKVEPKSCDKTHTCPPCPAPELLGPSVFL | |
| | | FPPKPKDTLMISRTPEVTCVVVDVSHEDPEVKFNWYVDGVEVHNAKTKP | |
| | | REEQYNSTYRVVSVLTVLHQDWLNGKEYKCKVSNKALPAPIEKTISKAK | |
| | | GQPREPQVYTLPPSREEMTKNQVSLTCLVKGFYPSDIAVEWESNGQPEN | |
| | | NYKTTPPVLDSDGSFFLYSKLTVDKSRWQQGNVFSCSVMHEALHNHYTQ | |
| | | KSLSLSPGK | |
| | 2^{nd} | EIVLTQSPATLSLSPGERATLSCRASSSVSYMHWYQQKPGQAPRPWIYA | 172 |
| | chain | TSNLASGIPARFSGSRSGTDYTLTISSLEPEDFAVYYCQQWSSNTLTFG | |
| | | GGTKVEIKRTVAAPSVFIFPPSDEQLKSGTASVVCLLNNFYPREAKVQW | |
| | | KVDNALQSGNSQESVTEQDSKDSTYSLSSTLTLSKADYEKHKVYACEVT | |
| | | HQGLSSPVTKSFNRGECGGGGSGGGGSGGGGSGGGGSQVQLVQSGAEVK | |
| | | KPGASVKVSCKASGYTFTNYNMHWVRQAPGQRLEWMGTIYPGNDDTSYN | |
| | | QKFKDRVTITADTSASTAYMELSSLRSEDTAVYYCARGGYRAMDYWGQG | |
| | | TLVTVSSGGGGSGGGGSGGGGSGGGGSDIVMTQSPLSLPVTPGEPASIS | |
| | | CRSSQSIVYSNGNTYLGWYLQKPGQSPQLLIYKVSNRFSGVPDRESGSG | |
| | | SGTDFTLKISRVEAEDVGVYYCFQGSHVPYTFGQGTKLEIK | |
| Ly2047 | 1^{st} | DIVMTQSPLSLPVTPGEPASISCRSSQSIVYSNGNTYLGWYLQKPGQSP | 173 |
| | chain | QLLIYKVSNRFSGVPDRFSGSGSGTDFTLKISRVEAEDVGVYYCFQGSH | |
| | | VPYTFGQGTKLEIKGGGGSGGGGSGGGGSGGGGSQVQLVQSGAEVKKPG | |
| | | ASVKVSCKASGYTFTNYNMHWVRQAPGQRLEWMGTIYPGNDDTSYNQKF | |
| | | KDRVTITADTSASTAYMELSSLRSEDTAVYYCARGGYRAMDYWGQGTLV | |
| | | TVSSGGGGSGGGGSGGGGSGGGGSQVQLVQSGAEVKKPGASVKVSCKAS | |
| | | GYTFTSYVMHWVRQKPGQGLEWIGYINPYNEGTESTDKFKGRATMTSDK | |
| | | STSTVYMELSSLRSEDTAVYYCASIYYGYEGTYFGVWGQGTLVTVSSAS | |
| | | TKGPSVFPLAPSSKSTSGGTAALGCLVKDYFPEPVTVSWNSGALTSGVH | |
| | | TFPAVLQSSGLYSLSSVVTVPSSSLGTQTYICNVNHKPSNTKVDKKVEP | |
| | | KSCDKTHTCPPCPAPELLGPSVFLFPPKPKDTLMISRTPEVTCVVVDVS | |
| | | HEDPEVKFNWYVDGVEVHNAKTKPREEQYNSTYRVVSVLIVLHQDWLNG | |
| | | KEYKCKVSNKALPAPIEKTISKAKGQPREPQVYTLPPSREEMTKNQVSL | |
| | | TCLVKGFYPSDIAVEWESNGQPENNYKTTPPVLDSDGSFFLYSKLTVDK | |
| | | SRWQQGNVFSCSVMHEALHNHYTQKSLSLSPGK | |
| | 2^{nd} | EIVLTQSPATLSLSPGERATLSCRASSSVSYMHWYQQKPGQAPRPWIYA | 174 |
| | chain | TSNLASGIPARFSGSRSGTDYTLTISSLEPEDFAVYYCQQWSSNTLTFG | |
| | | GGTKVEIKRTVAAPSVFIFPPSDEQLKSGTASVVCLLNNFYPREAKVQW | |
| | | KVDNALQSGNSQESVTEQDSKDSTYSLSSTLTLSKADYEKHKVYACEVT | |
| | | HQGLSSPVTKSFNRGEC | |
| Ly2048 | 1^{st} | QVQLVQSGAEVKKPGASVKVSCKASGYTFTNYNMHWVRQAPGQRLEWMG | 175 |
| | chain | TIYPGNDDTSYNQKFKDRVTITADTSASTAYMELSSLRSEDTAVYYCAR | |
| | | GGYRAMDYWGQGTLVTVSSGGGGSGGGGSGGGGSGGGGSDIVMTQSPLS | |
| | | LPVTPGEPASISCRSSQSIVYSNGNTYLGWYLQKPGQSPQLLIYKVSNR | |
| | | FSGVPDRFSGSGSGTDFTLKISRVEAEDVGVYYCFQGSHVPYTFGQGTK | |
| | | LEIKGGGGSGGGGSGGGGSGGGGSQVQLVQSGAEVKKPGASVKVSCKAS | |
| | | GYTFTSYVMHWVRQKPGQGLEWIGYINPYNEGTESTDKFKGRATMTSDK | |
| | | STSTVYMELSSLRSEDTAVYYCASIYYGYEGTYFGVWGQGTLVTVSSAS | |
| | | TKGPSVFPLAPSSKSTSGGTAALGCLVKDYFPEPVTVSWNSGALTSGVH | |
| | | TFPAVLQSSGLYSLSSVVTVPSSSLGTQTYICNVNHKPSNTKVDKKVEP | |
| | | KSCDKTHTCPPCPAPELLGPSVFLFPPKPKDTLMISRTPEVTCVVVDVS | |
| | | HEDPEVKFNWYVDGVEVHNAKTKPREEQYNSTYRVVSVLTVLHQDWLNG | |
| | | KEYKCKVSNKALPAPIEKTISKAKGQPREPQVYTLPPSREEMTKNQVSL | |
| | | TCLVKGFYPSDIAVEWESNGQPENNYKTTPPVLDSDGSFFLYSKLTVDK | |
| | | SRWQQGNVFSCSVMHEALHNHYTQKSLSLSPGK | |
| | 2^{nd} | EIVLTQSPATLSLSPGERATLSCRASSSVSYMHWYQQKPGQAPRPWIYA | 176 |
| | chain | TSNLASGIPARFSGSRSGTDYTLTISSLEPEDFAVYYCQQWSSNTLTFG | |
| | | GGTKVEIKRTVAAPSVFIFPPSDEQLKSGTASVVCLLNNFYPREAKVQW | |
| | | KVDNALQSGNSQESVTEQDSKDSTYSLSSTLTLSKADYEKHKVYACEVT | |
| | | HQGLSSPVTKSFNRGEC | |
| Ly2049 | 1^{st} | QVQLVQSGAEVKKPGASVKVSCKASGYTFTSYVMHWVRQKPGQGLEWIG | 177 |
| | chain | YINPYNEGTESTDKFKGRATMTSDKSTSTVYMELSSLRSEDTAVYYCAS | |
| | | IYYGYEGTYFGVWGQGTLVTVSSASTKGPSVFPLAPSSKSTSGGTAALG | |
| | | CLVKDYFPEPVTVSWNSGALTSGVHTFPAVLQSSGLYSLSSVVTVPSSS | |
| | | LGTQTYICNVNHKPSNTKVDKKVEPKSCDKTHTCPPCPAPELLGPSVFL | |
| | | FPPKPKDTLMISRTPEVTCVVVDVSHEDPEVKFNWYVDGVEVHNAKTKP | |
| | | REEQYNSTYRVVSVLTVLHQDWLNGKEYKCKVSNKALPAPIEKTISKAK | |
| | | GQPREPQVYTLPPCREEMTKNQVSLWCLVKGFYPSDIAVEWESNGQPEN | |
| | | NYKTTPPVLDSDGSFFLYSKLTVDKSRWQQGNVFSCSVMHEALHNHYTQ | |
| | | KSLSLSPGK | |
| | 2^{nd} | QVQLVQSGAEVKKPGASVKVSCKASGYTFTNYNMHWVRQAPGQRLEWMG | 178 |
| | chain | TIYPGNDDTSYNQKFKDRVTITADTSASTAYMELSSLRSEDTAVYYCAR | |
| | | GGYRAMDYWGQGTLVTVSSASVAAPSVFIFPPSDEQLKSGTASVVCLLN | |
| | | NFYPREAKVQWKVDNALQSGNSQESVTEQDSKDSTYSLSSTLTLSKADY | |
| | | EKHKVYACEVTHQGLSSPVTKSFNRGECDKTHTCPPCPAPELLGPSVFL | |
| | | FPPKPKDTLMISRTPEVTCVVVDVSHEDPEVKFNWYVDGVEVHNAKTKP | |
| | | REEQYNSTYRVVSVLTVLHQDWLNGKEYKCKVSNKALPAPIEKTISKAK | |
| | | GQPREPQVCTLPPSREEMTKNQVSLSCAVKGFYPSDIAVEWESNGQPEN | |
| | | NYKTTPPVLDSDGSFFLVSKLTVDKSRWQQGNVFSCSVMHEALHNRFTQ | |
| | | KSLSLSPGK | |
| | 3^{rd} | EIVLTQSPATLSLSPGERATLSCRASSSVSYMHWYQQKPGQAPRPWIYA | 179 |
| | chain | TSNLASGIPARFSGSRSGTDYTLTISSLEPEDFAVYYCQQWSSNTLTFG | |
| | | GGTKVEIKRTVAAPSVFIFPPSDEQLKSGTASVVCLLNNFYPREAKVQW | |
| | | KVDNALQSGNSQESVTEQDSKDSTYSLSSTLTLSKADYEKHKVYACEVT | |
| | | HQGLSSPVTKSFNRGEC | |
| | 4^{th} | DIVMTQSPLSLPVTPGEPASISCRSSQSIVYSNGNTYLGWYLQKPGQSP | 180 |
| | chain | QLLIYKVSNRFSGVPDRFSGSGSGTDFTLKISRVEAEDVGVYYCFQGSH | |
| | | VPYTFGQGTKLEIKSSASTKGPSVFPLAPSSKSTSGGTAALGCLVKDYF | |
| | | PEPVTVSWNSGALTSGVHTFPAVLQSSGLYSLSSVVTVPSSSLGTQTYI | |
| | | CNVNHKPSNTKVDKKVEPKSC | |
| Ly2050 | 1^{st} | QVQLVQSGAEVKKPGASVKVSCKASGYTFTSYVMHWVRQKPGQGLEWIG | 181 |
| | chain | YINPYNEGTESTDKFKGRATMTSDKSTSTVYMELSSLRSEDTAVYYCAS | |
| | | IYYGYEGTYFGVWGQGTLVTVSSASTKGPSVFPLAPSSKSTSGGTAALG | |
| | | CLVKDYFPEPVTVSWNSGALTSGVHTFPAVLQSSGLYSLSSVVTVPSSS | |
| | | LGTQTYICNVNHKPSNTKVDKKVEPKSCDKTHTCPPCPAPELLGPSVFL | |
| | | FPPKPKDTLMISRTPEVTCVVVDVSHEDPEVKFNWYVDGVEVHNAKTKP | |
| | | REEQYNSTYRVVSVLTVLHQDWLNGKEYKCKVSNKALPAPIEKTISKAK | |
| | | GQPREPQVYTDPPSREEMTKNQVSLTCEVKGFYPSDIAVEWESNGQPEN | |
| | | NYKTTPPVLDSDGSFFLYSKLTVDKSRWQQGNVFSCSVMHEALHNHYTQ | |
| | | KSLSLSPGK | |
| | 2^{nd} | QVQLVQSGAEVKKPGASVKVSCKASGYTFTNYNMHWVRQAPGQRLEWMG | 182 |
| | chain | TIYPGNDDTSYNQKFKDRVTITADTSASTAYMELSSLRSEDTAVYYCAR | |
| | | GGYRAMDYWGQGTLVTVSSASVAAPSVFIFPPSDEQLKSGTASVVCLLN | |
| | | NFYPREAKVQWKVDNALQSGNSQESVTEQDSKDSTYSLSSTLTLSKADY | |
| | | EKHKVYACEVTHQGLSSPVTKSFNRGECDKTHTCPPCPAPELLGPSVFL | |
| | | FPPKPKDTLMISRTPEVTCVVVDVSHEDPEVKFNWYVDGVEVHNAKTKP | |
| | | REEQYNSTYRVVSVLTVLHQDWLNGKEYKCKVSNKALPAPIEKTISKAK | |
| | | GQPREPQVYTKPPSREEMTKNQVSLTCKVKGFYPSDIAVEWESNGQPEN | |
| | | NYKTTPPVLDSDGSFFLYSKLTVDKSRWQQGNVFSCSVMHEALHNRETQ | |
| | | KSLSLSPGK | |
| | 3^{rd} | EIVLTQSPATLSLSPGERATLSCRASSSVSYMHWYQQKPGQAPRPWIYA | 183 |
| | chain | TSNLASGIPARFSGSRSGTDYTLTISSLEPEDFAVYYCQQWSSNTLTFG | |
| | | GGTKVEIKRTVAAPSVFIFPPSDEQLKSGTASVVCLLNNFYPREAKVQW | |
| | | KVDNALQSGNSQESVTEQDSKDSTYSLSSTLTLSKADYEKHKVYACEVT | |
| | | HQGLSSPVTKSFNRGEC | |
| | 4^{th} | DIVMTQSPLSLPVTPGEPASISCRSSQSIVYSNGNTYLGWYLQKPGQSP | 184 |
| | chain | QLLIYKVSNRFSGVPDRFSGSGSGTDFTLKISRVEAEDVGVYYCFQGSH | |
| | | VPYTFGQGTKLEIKSSASTKGPSVFPLAPSSKSTSGGTAALGCLVKDYF | |
| | | PEPVTVSWNSGALTSGVHTFPAVLQSSGLYSLSSVVTVPSSSLGTQTYI | |
| | | CNVNHKPSNTKVDKKVEPKSC | |
| Ly2051 | 1^{st} | QVQLVQSGAEVKKPGASVKVSCKASGYTFTSYVMHWVRQKPGQGLEWIG | 185 |
| | chain | YINPYNEGTESTDKFKGRATMTSDKSTSTVYMELSSLRSEDTAVYYCAS | |
| | | IYYGYEGTYFGVWGQGTLVTVSSASTKGPSVFPLAPSSKSTSGGTAALG | |
| | | CLVKDYFPEPVTVSWNSGALTSGVHTFPAVLQSSGLYSLSSVVTVPSSS | |
| | | LGTQTYICNVNHKPSNTKVDKKVEPKSCDKTHTCPPCPAPELLGPSVFL | |
| | | FPPKPKDTLMISRTPEVTCVVVDVSHEDPEVKFNWYVDGVEVHNAKTKP | |
| | | REEQYNSTYRVVSVLTVLHQDWLNGKEYKCKVSNKALPAPIEKTISKAK | |
| | | GQPREPQVYVYPPSREEMTKNQVSLTCLVKGFYPSDIAVEWESNGQPEN | |
| | | NYKTTPPVLDSDGSFALVSKLTVDKSRWQQGNVFSCSVMHEALHNHYTQ | |
| | | KSLSLSPGK | |
| | 2^{nd} | QVQLVQSGAEVKKPGASVKVSCKASGYTFTNYNMHWVRQAPGQRLEWMG | 186 |
| | chain | TIYPGNDDTSYNQKFKDRVTITADTSASTAYMELSSLRSEDTAVYYCAR | |
| | | GGYRAMDYWGQGTLVTVSSASVAAPSVFIFPPSDEQLKSGTASVVCLLN | |
| | | NFYPREAKVQWKVDNALQSGNSQESVTEQDSKDSTYSLSSTLTLSKADY | |
| | | EKHKVYACEVTHQGLSSPVTKSFNRGECDKTHTCPPCPAPELLGPSVFL | |
| | | FPPKPKDTLMISRTPEVTCVVVDVSHEDPEVKFNWYVDGVEVHNAKTKP | |
| | | REEQYNSTYRVVSVLTVLHQDWLNGKEYKCKVSNKALPAPIEKTISKAK | |
| | | GQPREPQVYVLPPSREEMTKNQVSLLCLVKGFYPSDIAVEWESNGQPEN | |
| | | NYLTWPPVLDSDGSFFLYSKLTVDKSRWQQGNVFSCSVMHEALHNRFTQ | |
| | | KSLSLSPGK | |
| | 3^{rd} | EIVLTQSPATLSLSPGERATLSCRASSSVSYMHWYQQKPGQAPRPWIYA | 187 |
| | chain | TSNLASGIPARFSGSRSGTDYTLTISSLEPEDFAVYYCQQWSSNTLTFG | |
| | | GGTKVEIKRTVAAPSVFIFPPSDEQLKSGTASVVCLLNNFYPREAKVQW | |
| | | KVDNALQSGNSQESVTEQDSKDSTYSLSSTLTLSKADYEKHKVYACEVT | |
| | | HQGLSSPVTKSFNRGEC | |
| | 4^{th} | DIVMTQSPLSLPVTPGEPASISCRSSQSIVYSNGNTYLGWYLQKPGQSP | 188 |
| | chain | QLLIYKVSNRFSGVPDRFSGSGSGTDFTLKISRVEAEDVGVYYCFQGSH | |
| | | VPYTFGQGTKLEIKSSASTKGPSVFPLAPSSKSTSGGTAALGCLVKDYF | |
| | | PEPVTVSWNSGALTSGVHTFPAVLQSSGLYSLSSVVTVPSSSLGTQTYI | |
| | | CNVNHKPSNTKVDKKVEPKSC | |
| Ly2052 | 1^{st} | QVQLVQSGAEVKKPGASVKVSCKASGYTFTSYVMHWVRQKPGQGLEWIG | 189 |
| | chain | YINPYNEGTESTDKFKGRATMTSDKSTSTVYMELSSLRSEDTAVYYCAS | |
| | | IYYGYEGTYFGVWGQGTLVTVSSASTKGPSVFPLAPSSKSTSGGTAALG | |
| | | CLVKDYFPEPVTVSWNSGALTSGVHTFPAVLQSSGLYSLSSVVTVPSSS | |
| | | LGTQTYICNVNHKPSNTKVDKKVEPKSCDKTHTCPPCPAPELLGPSVFL | |
| | | FPPKPKDTLMISRTPEVTCVVVDVSHEDPEVKFNWYVDGVEVHNAKTKP | |
| | | REEQYNSTYRVVSVLTVLHQDWLNGKEYKCKVSNKALPAPIEKTISKAK | |
| | | GQPREPQVYTLPPCREEMTKNQVSLWCLVKGFYPSDIAVEWESNGQPEN | |
| | | NYKTTPPVLDSDGSFFLYSKLTVDKSRWQQGNVFSCSVMHEALHNHYTQ | |
| | | KSLSLSPGK | |
| | 2^{nd} | QVQLVQSGAEVKKPGASVKVSCKASGYTFTNYNMHWVRQAPGQRLEWMG | 190 |
| | chain | TIYPGNDDTSYNQKFKDRVTITADTSASTAYMELSSLRSEDTAVYYCAR | |
| | | GGYRAMDYWGQGTLVTVSSDLKNVFPPEVAVFEPSEAEISHTQKATLVC | |
| | | LATGFYPDHVELSWWVNGKEVHSGVCTDPQPLKEQPALQDSRYALSSRL | |
| | | RVSATFWQNPRNHFRCQVQFYGLSENDEWTQDRAKPVTQIVSAEAWGRA | |
| | | SDKTHTCPPCPAPELLGPSVFLFPPKPKDTLMISRTPEVTCVVVDVSHE | |
| | | DPEVKFNWYVDGVEVHNAKTKPREEQYNSTYRVVSVLTVLHQDWLNGKE | |
| | | YKCKVSNKALPAPIEKTISKAKGQPREPQVCTLPPSREEMTKNQVSLSC | |
| | | AVKGFYPSDIAVEWESNGQPENNYKTTPPVLDSDGSFFLVSKLTVDKSR | |
| | | WQQGNVFSCSVMHEALHNRFTQKSLSLSPGK | |
| | 3^{rd} | EIVLTQSPATLSLSPGERATLSCRASSSVSYMHWYQQKPGQAPRPWIYA | 191 |
| | chain | TSNLASGIPARFSGSRSGTDYTLTISSLEPEDFAVYYCQQWSSNTLTFG | |
| | | GGTKVEIKRTVAAPSVFIFPPSDEQLKSGTASVVCLLNNFYPREAKVQW | |
| | | KVDNALQSGNSQESVTEQDSKDSTYSLSSTLTLSKADYEKHKVYACEVT | |
| | | HQGLSSPVTKSFNRGEC | |
| | 4^{th} | DIVMTQSPLSLPVTPGEPASISCRSSQSIVYSNGNTYLGWYLQKPGQSP | 192 |
| | chain | QLLIYKVSNRFSGVPDRFSGSGSGTDFTLKISRVEAEDVGVYYCFQGSH | |
| | | VPYTFGQGTKLEIKPDIQNPDPAVYQLRDSKSSDKSVCLFTDFDSQTQV | |
| | | SQSKDSDVYITDKCVLDMRSMDFKSNSAVAWSQKSDFACANAFQNSIIP | |
| | | EDTFFPSPESS | |
| Ly2053 | 1^{st} | QVQLVQSGAEVKKPGASVKVSCKASGYTFTSYVMHWVRQKPGQGLEWIG | 193 |
| | chain | YINPYNEGTESTDKFKGRATMTSDKSTSTVYMELSSLRSEDTAVYYCAS | |
| | | IYYGYEGTYFGVWGQGTLVTVSSASTKGPSVFPLAPSSKSTSGGTAALG | |
| | | CLVKDYFPEPVTVSWNSGALTSGVHTFPAVLQSSGLYSLSSVVTVPSSS | |
| | | LGTQTYICNVNHKPSNTKVDKKVEPKSCDKTHTCPPCPAPELLGPSVFL | |
| | | FPPKPKDTLMISRTPEVTCVVVDVSHEDPEVKFNWYVDGVEVHNAKTKP | |
| | | REEQYNSTYRVVSVLTVLHQDWLNGKEYKCKVSNKALPAPIEKTISKAK | |
| | | GQPREPQVYTLPPCREEMTKNQVSLWCLVKGFYPSDIAVEWESNGQPEN | |
| | | NYKTTPPVLDSDGSFFLYSKLTVDKSRWQQGNVFSCSVMHEALHNHYTQ | |
| | | KSLSLSPGK | |
| | 2^{nd} | QVQLVQSGAEVKKPGASVKVSCKASGYTFTSYVMHWVRQKPGQGLEWIG | 194 |
| | chain | YINPYNEGTESTDKFKGRATMTSDKSTSTVYMELSSLRSEDTAVYYCAS | |
| | | IYYGYEGTYFGVWGQGTLVTVSSASTKGPSVFPLAPSSKSTSGGTAALG | |
| | | CLVKDYFPEPVTVSWNSGALTSGVHTFPAVLQSSGLYSLSSVVTVPSSS | |
| | | LGTQTYICNVNHKPSNTKVDKKVEPKSCGGGGSGGGGSGGGGSGGGGSQ | |
| | | VQLVQSGAEVKKPGASVKVSCKASGYTFTNYNMHWVRQAPGQRLEWMGT | |
| | | IYPGNDDTSYNQKFKDRVTITADTSASTAYMELSSLRSEDTAVYYCARG | |
| | | GYRAMDYWGQGTLVTVSSDLKNVFPPEVAVFEPSEAEISHTQKATLVCL | |
| | | ATGFYPDHVELSWWVNGKEVHSGVCTDPQPLKEQPALQDSRYALSSRLR | |
| | | VSATFWQNPRNHFRCQVQFYGLSENDEWTQDRAKPVTQIVSAEAWGRAS | |
| | | DKTHTCPPCPAPELLGPSVFLFPPKPKDTLMISRTPEVTCVVVDVSHED | |
| | | PEVKFNWYVDGVEVHNAKTKPREEQYNSTYRVVSVLTVLHQDWLNGKEY | |
| | | KCKVSNKALPAPIEKTISKAKGQPREPQVYTLPPSREEMTKNQVSLSCA | |
| | | VKGFYPSDIAVEWESNGQPENNYKTTPPVLDSDGSFFLVSKLTVDKSRW | |
| | | QQGNVFSCSVMHEALHNRFTQKSLSLSPGK | |
| | 3^{rd} | EIVLTQSPATLSLSPGERATLSCRASSSVSYMHWYQQKPGQAPRPWIYA | 195 |
| | chain | TSNLASGIPARFSGSRSGTDYTLTISSLEPEDFAVYYCQQWSSNTLTFG | |
| | | GGTKVEIKRTVAAPSVFIFPPSDEQLKSGTASVVCLLNNFYPREAKVQW | |
| | | KVDNALQSGNSQESVTEQDSKDSTYSLSSTLTLSKADYEKHKVYACEVT | |
| | | HQGLSSPVTKSFNRGEC | |
| | 4^{th} | DIVMTQSPLSLPVTPGEPASISCRSSQSIVYSNGNTYLGWYLQKPGQSP | 196 |
| | chain | QLLIYKVSNRFSGVPDRFSGSGSGTDFTLKISRVEAEDVGVYYCFQGSH | |
| | | VPYTFGQGTKLEIKPDIQNPDPAVYQLRDSKSSDKSVCLFTDFDSQTQV | |
| | | SQSKDSDVYITDKCVLDMRSMDFKSNSAVAWSQKSDFACANAFQNSIIP | |
| | | EDTFFPSPESS | |
| Ly2054 | 1^{st} | QVQLVQSGAEVKKPGASVKVSCKASGYTFTSYVMHWVRQKPGQGLEWIG | 197 |
| | chain | YINPYNEGTESTDKFKGRATMTSDKSTSTVYMELSSLRSEDTAVYYCAS | |
| | | IYYGYEGTYFGVWGQGTLVTVSSASTKGPSVFPLAPSSKSTSGGTAALG | |
| | | CLVKDYFPEPVTVSWNSGALTSGVHTFPAVLQSSGLYSLSSVVTVPSSS | |
| | | LGTQTYICNVNHKPSNTKVDKKVEPKSCDKTHTCPPCPAPELLGPSVFL | |
| | | FPPKPKDTLMISRTPEVTCVVVDVSHEDPEVKFNWYVDGVEVHNAKTKP | |
| | | REEQYNSTYRVVSVLTVLHQDWLNGKEYKCKVSNKALPAPIEKTISKAK | |
| | | GQPREPQVYTLPPSREEMTKNQVSLTCLVKGFYPSDIAVEWESNGQPEN | |
| | | NYKTTPPVLDSDGSFFLYSKLTVDKSRWQQGNVFSCSVMHEALHNHYTQ | |
| | | KSLSLSPGGGGGSGGGGSGGGGSGGGGSDIVMTQSPDSLAVSLGERATI | |
| | | NCKSSQSVLYSSNNRNYLAWYQQKPGQPPKLLINQASTRASGVPDRESG | |
| | | SGSGTEFTLIISSLHAEDVAIYYCQQYYTPPLAFGGGTKLEIKGGGGSG | |
| | | GGGSGGGGSGGGGSKVQLVESGGGLVKPGGSLRLSCAASGFTFSNAWMN | |
| | | WVRQAPGKGLEWVGRIKRKTDGETTDYAAPVKGRFSISRDDSKNTLYLQ | |
| | | MNSLKTEDTAVYYCAGSNRAFDIWGQGTMVTVSA | |
| | 2^{nd} | EIVLTQSPATLSLSPGERATLSCRASSSVSYMHWYQQKPGQAPRPWIYA | 198 |
| | chain | TSNLASGIPARFSGSRSGTDYTLTISSLEPEDFAVYYCQQWSSNTLTFG | |
| | | GGTKVEIKRTVAAPSVFIFPPSDEQLKSGTASVVCLLNNFYPREAKVQW | |
| | | KVDNALQSGNSQESVTEQDSKDSTYSLSSTLTLSKADYEKHKVYACEVT | |
| | | HQGLSSPVTKSFNRGEC | |
| Ly2055 | 1^{st} | QVQLVQSGAEVKKPGASVKVSCKASGYTFTSYVMHWVRQKPGQGLEWIG | 199 |
| | chain | YINPYNEGTESTDKFKGRATMTSDKSTSTVYMELSSLRSEDTAVYYCAS | |
| | | IYYGYEGTYFGVWGQGTLVTVSSASTKGPSVFPLAPSSKSTSGGTAALG | |
| | | CLVKDYFPEPVTVSWNSGALTSGVHTFPAVLQSSGLYSLSSVVTVPSSS | |
| | | LGTQTYICNVNHKPSNTKVDKKVEPKSCDKTHTCPPCPAPELLGPSVFL | |
| | | FPPKPKDTLMISRTPEVTCVVVDVSHEDPEVKFNWYVDGVEVHNAKTKP | |
| | | REEQYNSTYRVVSVLTVLHQDWLNGKEYKCKVSNKALPAPIEKTISKAK | |
| | | GQPREPQVYTLPPSREEMTKNQVSLTCLVKGFYPSDIAVEWESNGQPEN | |
| | | NYKTTPPVLDSDGSFFLYSKLTVDKSRWQQGNVFSCSVMHEALHNHYTQ | |
| | | KSLSLSPGGGGGSGGGGSGGGGSGGGGSKVQLVESGGGLVKPGGSLRLS | |
| | | CAASGFTFSNAWMNWVRQAPGKGLEWVGRIKRKTDGETTDYAAPVKGRF | |
| | | SISRDDSKNTLYLQMNSLKTEDTAVYYCAGSNRAFDIWGQGTMVTVSAG | |
| | | GGGSGGGGSGGGGSGGGGSDIVMTQSPDSLAVSLGERATINCKSSQSVL | |
| | | YSSNNRNYLAWYQQKPGQPPKLLINQASTRASGVPDRFSGSGSGTEFTL | |
| | | IISSLHAEDVAIYYCQQYYTPPLAFGGGTKLEIK | |
| | 2^{nd} | EIVLTQSPATLSLSPGERATLSCRASSSVSYMHWYQQKPGQAPRPWIYA | 200 |
| | chain | TSNLASGIPARFSGSRSGTDYTLTISSLEPEDFAVYYCQQWSSNTLTFG | |
| | | GGTKVEIKRTVAAPSVFIFPPSDEQLKSGTASVVCLLNNFYPREAKVQW | |
| | | KVDNALQSGNSQESVTEQDSKDSTYSLSSTLTLSKADYEKHKVYACEVT | |
| | | HQGLSSPVTKSFNRGEC | |
| Ly2056 | 1^{st} | QVQLVQSGAEVKKPGASVKVSCKASGYTFTSYVMHWVRQKPGQGLEWIG | 201 |
| | chain | YINPYNEGTESTDKFKGRATMTSDKSTSTVYMELSSLRSEDTAVYYCAS | |
| | | IYYGYEGTYFGVWGQGTLVTVSSASTKGPSVFPLAPSSKSTSGGTAALG | |
| | | CLVKDYFPEPVTVSWNSGALTSGVHTFPAVLQSSGLYSLSSVVTVPSSS | |
| | | LGTQTYICNVNHKPSNTKVDKKVEPKSCDKTHTCPPCPAPELLGPSVFL | |
| | | FPPKPKDTLMISRTPEVTCVVVDVSHEDPEVKFNWYVDGVEVHNAKTKP | |
| | | REEQYNSTYRVVSVLTVLHQDWLNGKEYKCKVSNKALPAPIEKTISKAK | |
| | | GQPREPQVYTLPPSREEMTKNQVSLTCLVKGFYPSDIAVEWESNGQPEN | |
| | | NYKTTPPVLDSDGSFFLYSKLTVDKSRWQQGNVFSCSVMHEALHNHYTQ | |
| | | KSLSLSPGK | |
| | 2^{nd} | EIVLTQSPATLSLSPGERATLSCRASSSVSYMHWYQQKPGQAPRPWIYA | 202 |
| | chain | TSNLASGIPARFSGSRSGTDYTLTISSLEPEDFAVYYCQQWSSNTLTFG | |
| | | GGTKVEIKRTVAAPSVFIFPPSDEQLKSGTASVVCLLNNFYPREAKVQW | |
| | | KVDNALQSGNSQESVTEQDSKDSTYSLSSTLTLSKADYEKHKVYACEVT | |
| | | HQGLSSPVTKSFNRGECGGGGSGGGGSGGGGSGGGGSDIVMTQSPDSLA | |
| | | VSLGERATINCKSSQSVLYSSNNRNYLAWYQQKPGQPPKLLINQASTRA | |
| | | SGVPDRFSGSGSGTEFTLIISSLHAEDVAIYYCQQYYTPPLAFGGGTKL | |
| | | EIKGGGGSGGGGSGGGGSGGGGSKVQLVESGGGLVKPGGSLRLSCAASG | |
| | | FTFSNAWMNWVRQAPGKGLEWVGRIKRKTDGETTDYAAPVKGRFSISRD | |
| | | DSKNTLYLQMNSLKTEDTAVYYCAGSNRAFDIWGQGTMVTVSA | |
| Ly2057 | 1^{st} | QVQLVQSGAEVKKPGASVKVSCKASGYTFTSYVMHWVRQKPGQGLEWIG | 203 |
| | chain | YINPYNEGTESTDKFKGRATMTSDKSTSTVYMELSSLRSEDTAVYYCAS | |
| | | IYYGYEGTYFGVWGQGTLVTVSSASTKGPSVFPLAPSSKSTSGGTAALG | |
| | | CLVKDYFPEPVTVSWNSGALTSGVHTFPAVLQSSGLYSLSSVVTVPSSS | |
| | | LGTQTYICNVNHKPSNTKVDKKVEPKSCDKTHTCPPCPAPELLGPSVFL | |
| | | FPPKPKDTLMISRTPEVTCVVVDVSHEDPEVKFNWYVDGVEVHNAKTKP | |
| | | REEQYNSTYRVVSVLTVLHQDWLNGKEYKCKVSNKALPAPIEKTISKAK | |
| | | GQPREPQVYTLPPSREEMTKNQVSLTCLVKGFYPSDIAVEWESNGQPEN | |
| | | NYKTTPPVLDSDGSFFLYSKLTVDKSRWQQGNVFSCSVMHEALHNHYTQ | |
| | | KSLSLSPGK | |
| | 2^{nd} | EIVLTQSPATLSLSPGERATLSCRASSSVSYMHWYQQKPGQAPRPWIYA | 204 |
| | chain | TSNLASGIPARFSGSRSGTDYTLTISSLEPEDFAVYYCQQWSSNTLTFG | |
| | | GGTKVEIKRTVAAPSVFIFPPSDEQLKSGTASVVCLLNNFYPREAKVQW | |
| | | KVDNALQSGNSQESVTEQDSKDSTYSLSSTLTLSKADYEKHKVYACEVT | |
| | | HQGLSSPVTKSFNRGECGGGGSGGGGSGGGGSGGGGSKVQLVESGGGLV | |
| | | KPGGSLRLSCAASGFTFSNAWMNWVRQAPGKGLEWVGRIKRKTDGETTD | |
| | | YAAPVKGRFSISRDDSKNTLYLQMNSLKTEDTAVYYCAGSNRAFDIWGQ | |
| | | GTMVTVSAGGGGSGGGGSGGGGSGGGGSDIVMTQSPDSLAVSLGERATI | |
| | | NCKSSQSVLYSSNNRNYLAWYQQKPGQPPKLLINQASTRASGVPDRFSG | |
| | | SGSGTEFTLIISSLHAEDVAIYYCQQYYTPPLAFGGGTKLEIK | |
| Ly2058 | 1^{st} | DIVMTQSPDSLAVSLGERATINCKSSQSVLYSSNNRNYLAWYQQKPGQP | 205 |
| | chain | PKLLINQASTRASGVPDRFSGSGSGTEFTLIISSLHAEDVAIYYCQQYY | |
| | | TPPLAFGGGTKLEIKGGGGSGGGGSGGGGSGGGGSKVQLVESGGGLVKP | |
| | | GGSLRLSCAASGFTFSNAWMNWVRQAPGKGLEWVGRIKRKTDGETTDYA | |
| | | APVKGRFSISRDDSKNTLYLQMNSLKTEDTAVYYCAGSNRAFDIWGQGT | |
| | | MVTVSAGGGGSGGGGSGGGGSGGGGSQVQLVQSGAEVKKPGASVKVSCK | |
| | | ASGYTFTSYVMHWVRQKPGQGLEWIGYINPYNEGTESTDKFKGRATMTS | |
| | | DKSTSTVYMELSSLRSEDTAVYYCASIYYGYEGTYFGVWGQGTLVTVSS | |
| | | ASTKGPSVFPLAPSSKSTSGGTAALGCLVKDYFPEPVTVSWNSGALTSG | |
| | | VHTFPAVLQSSGLYSLSSVVTVPSSSLGTQTYICNVNHKPSNTKVDKKV | |
| | | EPKSCDKTHTCPPCPAPELLGPSVFLFPPKPKDTLMISRTPEVTCVVVD | |
| | | VSHEDPEVKFNWYVDGVEVHNAKTKPREEQYNSTYRVVSVLTVLHQDWL | |
| | | NGKEYKCKVSNKALPAPIEKTISKAKGQPREPQVYTLPPSREEMTKNQV | |
| | | SLTCLVKGFYPSDIAVEWESNGQPENNYKTTPPVLDSDGSFFLYSKLTV | |
| | | DKSRWQQGNVFSCSVMHEALHNHYTQKSLSLSPGK | |
| | 2^{nd} | EIVLTQSPATLSLSPGERATLSCRASSSVSYMHWYQQKPGQAPRPWIYA | 206 |
| | chain | TSNLASGIPARFSGSRSGTDYTLTISSLEPEDFAVYYCQQWSSNTLTFG | |
| | | GGTKVEIKRTVAAPSVFIFPPSDEQLKSGTASVVCLLNNFYPREAKVQW | |
| | | KVDNALQSGNSQESVTEQDSKDSTYSLSSTLTLSKADYEKHKVYACEVT | |
| | | HQGLSSPVTKSFNRGEC | |
| Ly2059 | 1^{st} | KVQLVESGGGLVKPGGSLRLSCAASGFTFSNAWMNWVRQAPGKGLEWVG | 207 |
| | chain | RIKRKTDGETTDYAAPVKGRFSISRDDSKNTLYLQMNSLKTEDTAVYYC | |
| | | AGSNRAFDIWGQGTMVTVSAGGGGSGGGGSGGGGSGGGGSDIVMTQSPD | |
| | | SLAVSLGERATINCKSSQSVLYSSNNRNYLAWYQQKPGQPPKLLINQAS | |
| | | TRASGVPDRESGSGSGTEFTLIISSLHAEDVAIYYCQQYYTPPLAFGGG | |
| | | TKLEIKGGGGSGGGGSGGGGSGGGGSQVQLVQSGAEVKKPGASVKVSCK | |
| | | ASGYTFTSYVMHWVRQKPGQGLEWIGYINPYNEGTESTDKFKGRATMTS | |
| | | DKSTSTVYMELSSLRSEDTAVYYCASIYYGYEGTYFGVWGQGTLVTVSS | |
| | | ASTKGPSVFPLAPSSKSTSGGTAALGCLVKDYFPEPVTVSWNSGALTSG | |
| | | VHTFPAVLQSSGLYSLSSVVTVPSSSLGTQTYICNVNHKPSNTKVDKKV | |
| | | EPKSCDKTHTCPPCPAPELLGPSVFLFPPKPKDTLMISRTPEVTCVVVD | |
| | | VSHEDPEVKFNWYVDGVEVHNAKTKPREEQYNSTYRVVSVLTVLHQDWL | |
| | | NGKEYKCKVSNKALPAPIEKTISKAKGQPREPQVYTLPPSREEMTKNQV | |
| | | SLTCLVKGFYPSDIAVEWESNGQPENNYKTTPPVLDSDGSFFLYSKLTV | |
| | | DKSRWQQGNVFSCSVMHEALHNHYTQKSLSLSPGK | |
| | 2^{nd} | EIVLTQSPATLSLSPGERATLSCRASSSVSYMHWYQQKPGQAPRPWIYA | 208 |
| | chain | TSNLASGIPARFSGSRSGTDYTLTISSLEPEDFAVYYCQQWSSNTLTFG | |
| | | GGTKVEIKRTVAAPSVFIFPPSDEQLKSGTASVVCLLNNFYPREAKVQW | |
| | | KVDNALQSGNSQESVTEQDSKDSTYSLSSTLTLSKADYEKHKVYACEVT | |
| | | HQGLSSPVTKSFNRGEC | |
| Ly2060 | 1^{st} | QVQLVQSGAEVKKPGASVKVSCKASGYTFTSYVMHWVRQKPGQGLEWIG | 209 |
| | chain | YINPYNEGTESTDKFKGRATMTSDKSTSTVYMELSSLRSEDTAVYYCAS | |
| | | IYYGYEGTYFGVWGQGTLVTVSSASTKGPSVFPLAPSSKSTSGGTAALG | |
| | | CLVKDYFPEPVTVSWNSGALTSGVHTFPAVLQSSGLYSLSSVVTVPSSS | |
| | | LGTQTYICNVNHKPSNTKVDKKVEPKSCDKTHTCPPCPAPELLGPSVFL | |
| | | FPPKPKDTLMISRTPEVTCVVVDVSHEDPEVKFNWYVDGVEVHNAKTKP | |
| | | REEQYNSTYRVVSVLTVLHQDWLNGKEYKCKVSNKALPAPIEKTISKAK | |
| | | GQPREPQVYTLPPCREEMTKNQVSLWCLVKGFYPSDIAVEWESNGQPEN | |
| | | NYKTTPPVLDSDGSFFLYSKLTVDKSRWQQGNVFSCSVMHEALHNHYTQ | |
| | | KSLSLSPGK | |
| | 2^{nd} | KVQLVESGGGLVKPGGSLRLSCAASGFTFSNAWMNWVRQAPGKGLEWVG | 210 |
| | chain | RIKRKTDGETTDYAAPVKGRFSISRDDSKNTLYLQMNSLKTEDTAVYYC | |
| | | AGSNRAFDIWGQGTMVTVSAASVAAPSVFIFPPSDEQLKSGTASVVCLL | |
| | | NNFYPREAKVQWKVDNALQSGNSQESVTEQDSKDSTYSLSSTLTLSKAD | |
| | | YEKHKVYACEVTHQGLSSPVTKSFNRGECDKTHTCPPCPAPELLGPSVF | |
| | | LFPPKPKDTLMISRTPEVTCVVVDVSHEDPEVKFNWYVDGVEVHNAKTK | |
| | | PREEQYNSTYRVVSVLTVLHQDWLNGKEYKCKVSNKALPAPIEKTISKA | |
| | | KGQPREPQVCTLPPSREEMTKNQVSLSCAVKGFYPSDIAVEWESNGQPE | |
| | | NNYKTTPPVLDSDGSFFLVSKLTVDKSRWQQGNVFSCSVMHEALHNRFT | |
| | | QKSLSLSPGK | |
| | 3^{rd} | EIVLTQSPATLSLSPGERATLSCRASSSVSYMHWYQQKPGQAPRPWIYA | 211 |
| | chain | TSNLASGIPARFSGSRSGTDYTLTISSLEPEDFAVYYCQQWSSNTLTFG | |
| | | GGTKVEIKRTVAAPSVFIFPPSDEQLKSGTASVVCLLNNFYPREAKVQW | |
| | | KVDNALQSGNSQESVTEQDSKDSTYSLSSTLTLSKADYEKHKVYACEVT | |
| | | HQGLSSPVTKSFNRGEC | |
| | 4^{th} | DIVMTQSPDSLAVSLGERATINCKSSQSVLYSSNNRNYLAWYQQKPGQP | 212 |
| | chain | PKLLINQASTRASGVPDRFSGSGSGTEFTLIISSLHAEDVAIYYCQQYY | |
| | | TPPLAFGGGTKLEIKSSASTKGPSVFPLAPSSKSTSGGTAALGCLVKDY | |
| | | FPEPVTVSWNSGALTSGVHTFPAVLQSSGLYSLSSVVTVPSSSLGTQTY | |
| | | ICNVNHKPSNTKVDKKVEPKSC | |
| Ly2061 | 1^{st} | QVQLVQSGAEVKKPGASVKVSCKASGYTFTSYVMHWVRQKPGQGLEWIG | 213 |
| | chain | YINPYNEGTESTDKFKGRATMTSDKSTSTVYMELSSLRSEDTAVYYCAS | |
| | | IYYGYEGTYFGVWGQGTLVTVSSASTKGPSVFPLAPSSKSTSGGTAALG | |
| | | CLVKDYFPEPVTVSWNSGALTSGVHTFPAVLQSSGLYSLSSVVTVPSSS | |
| | | LGTQTYICNVNHKPSNTKVDKKVEPKSCDKTHTCPPCPAPELLGPSVFL | |
| | | FPPKPKDTLMISRTPEVTCVVVDVSHEDPEVKFNWYVDGVEVHNAKTKP | |
| | | REEQYNSTYRVVSVLTVLHQDWLNGKEYKCKVSNKALPAPIEKTISKAK | |
| | | GQPREPQVYTDPPSREEMTKNQVSLTCEVKGFYPSDIAVEWESNGQPEN | |
| | | NYKTTPPVLDSDGSFFLYSKLTVDKSRWQQGNVFSCSVMHEALHNHYTQ | |
| | | KSLSLSPGK | |
| | 2^{nd} | KVQLVESGGGLVKPGGSLRLSCAASGFTFSNAWMNWVRQAPGKGLEWVG | 214 |
| | chain | RIKRKTDGETTDYAAPVKGRFSISRDDSKNTLYLQMNSLKTEDTAVYYC | |
| | | AGSNRAFDIWGQGTMVTVSAASVAAPSVFIFPPSDEQLKSGTASVVCLL | |
| | | NNFYPREAKVQWKVDNALQSGNSQESVTEQDSKDSTYSLSSTLTLSKAD | |
| | | YEKHKVYACEVTHQGLSSPVTKSFNRGECDKTHTCPPCPAPELLGPSVF | |
| | | LFPPKPKDTLMISRTPEVTCVVVDVSHEDPEVKFNWYVDGVEVHNAKTK | |
| | | PREEQYNSTYRVVSVLTVLHQDWLNGKEYKCKVSNKALPAPIEKTISKA | |
| | | KGQPREPQVYTKPPSREEMTKNQVSLTCKVKGFYPSDIAVEWESNGQPE | |
| | | NNYKTTPPVLDSDGSFFLYSKLTVDKSRWQQGNVFSCSVMHEALHNRFT | |
| | | QKSLSLSPGK | |
| | 3^{rd} | EIVLTQSPATLSLSPGERATLSCRASSSVSYMHWYQQKPGQAPRPWIYA | 215 |
| | chain | TSNLASGIPARFSGSRSGTDYTLTISSLEPEDFAVYYCQQWSSNTLTFG | |
| | | GGTKVEIKRTVAAPSVFIFPPSDEQLKSGTASVVCLLNNFYPREAKVQW | |
| | | KVDNALQSGNSQESVTEQDSKDSTYSLSSTLTLSKADYEKHKVYACEVT | |
| | | HQGLSSPVTKSFNRGEC | |
| | 4^{th} | DIVMTQSPDSLAVSLGERATINCKSSQSVLYSSNNRNYLAWYQQKPGQP | 216 |
| | chain | PKLLINQASTRASGVPDRFSGSGSGTEFTLIISSLHAEDVAIYYCQQYY | |
| | | TPPLAFGGGTKLEIKSSASTKGPSVFPLAPSSKSTSGGTAALGCLVKDY | |
| | | FPEPVTVSWNSGALTSGVHTFPAVLQSSGLYSLSSVVTVPSSSLGTQTY | |
| | | ICNVNHKPSNTKVDKKVEPKSC | |
| Ly2062 | 1^{st} | QVQLVQSGAEVKKPGASVKVSCKASGYTFTSYVMHWVRQKPGQGLEWIG | 217 |
| | chain | YINPYNEGTESTDKFKGRATMTSDKSTSTVYMELSSLRSEDTAVYYCAS | |
| | | IYYGYEGTYFGVWGQGTLVTVSSASTKGPSVFPLAPSSKSTSGGTAALG | |
| | | CLVKDYFPEPVTVSWNSGALTSGVHTFPAVLQSSGLYSLSSVVTVPSSS | |
| | | LGTQTYICNVNHKPSNTKVDKKVEPKSCDKTHTCPPCPAPELLGPSVFL | |
| | | FPPKPKDTLMISRTPEVTCVVVDVSHEDPEVKFNWYVDGVEVHNAKTKP | |
| | | REEQYNSTYRVVSVLTVLHQDWLNGKEYKCKVSNKALPAPIEKTISKAK | |
| | | GQPREPQVYVYPPSREEMTKNQVSLTCLVKGFYPSDIAVEWESNGQPEN | |
| | | NYKTTPPVLDSDGSFALVSKLTVDKSRWQQGNVFSCSVMHEALHNHYTQ | |
| | | KSLSLSPGK | |
| | 2^{nd} | KVQLVESGGGLVKPGGSLRLSCAASGFTFSNAWMNWVRQAPGKGLEWVG | 218 |
| | chain | RIKRKTDGETTDYAAPVKGRFSISRDDSKNTLYLQMNSLKTEDTAVYYC | |
| | | AGSNRAFDIWGQGTMVTVSAASVAAPSVFIFPPSDEQLKSGTASVVCLL | |
| | | NNFYPREAKVQWKVDNALQSGNSQESVTEQDSKDSTYSLSSTLTLSKAD | |
| | | YEKHKVYACEVTHQGLSSPVTKSFNRGECDKTHTCPPCPAPELLGPSVF | |
| | | LFPPKPKDTLMISRTPEVTCVVVDVSHEDPEVKFNWYVDGVEVHNAKTK | |
| | | PREEQYNSTYRVVSVLTVLHQDWLNGKEYKCKVSNKALPAPIEKTISKA | |
| | | KGQPREPQVYVLPPSREEMTKNQVSLLCLVKGFYPSDIAVEWESNGQPE | |
| | | NNYLTWPPVLDSDGSFFLYSKLTVDKSRWQQGNVFSCSVMHEALHNRFT | |
| | | QKSLSLSPGK | |
| | 3^{rd} | EIVLTQSPATLSLSPGERATLSCRASSSVSYMHWYQQKPGQAPRPWIYA | 219 |
| | chain | TSNLASGIPARFSGSRSGTDYTLTISSLEPEDFAVYYCQQWSSNTLTFG | |
| | | GGTKVEIKRTVAAPSVFIFPPSDEQLKSGTASVVCLLNNFYPREAKVQW | |
| | | KVDNALQSGNSQESVTEQDSKDSTYSLSSTLTLSKADYEKHKVYACEVT | |
| | | HQGLSSPVTKSFNRGEC | |
| | 4^{th} | DIVMTQSPDSLAVSLGERATINCKSSQSVLYSSNNRNYLAWYQQKPGQP | 220 |
| | chain | PKLLINQASTRASGVPDRFSGSGSGTEFTLIISSLHAEDVAIYYCQQYY | |
| | | TPPLAFGGGTKLEIKSSASTKGPSVFPLAPSSKSTSGGTAALGCLVKDY | |
| | | FPEPVTVSWNSGALTSGVHTFPAVLQSSGLYSLSSVVTVPSSSLGTQTY | |
| | | ICNVNHKPSNTKVDKKVEPKSC | |
| Ly2063 | 1^{st} | QVQLVQSGAEVKKPGASVKVSCKASGYTFTSYVMHWVRQKPGQGLEWIG | 221 |
| | chain | YINPYNEGTESTDKFKGRATMTSDKSTSTVYMELSSLRSEDTAVYYCAS | |
| | | IYYGYEGTYFGVWGQGTLVTVSSASTKGPSVFPLAPSSKSTSGGTAALG | |
| | | CLVKDYFPEPVTVSWNSGALTSGVHTFPAVLQSSGLYSLSSVVTVPSSS | |
| | | LGTQTYICNVNHKPSNTKVDKKVEPKSCDKTHTCPPCPAPELLGPSVFL | |
| | | FPPKPKDTLMISRTPEVTCVVVDVSHEDPEVKFNWYVDGVEVHNAKTKP | |
| | | REEQYNSTYRVVSVLTVLHQDWLNGKEYKCKVSNKALPAPIEKTISKAK | |
| | | GQPREPQVYTLPPCREEMTKNQVSLWCLVKGFYPSDIAVEWESNGQPEN | |
| | | NYKTTPPVLDSDGSFFLYSKLTVDKSRWQQGNVFSCSVMHEALHNHYTQ | |
| | | KSLSLSPGK | |
| | 2^{nd} | KVQLVESGGGLVKPGGSLRLSCAASGFTFSNAWMNWVRQAPGKGLEWVG | 222 |
| | chain | RIKRKTDGETTDYAAPVKGRFSISRDDSKNTLYLQMNSLKTEDTAVYYC | |
| | | AGSNRAFDIWGQGTMVTVSADLKNVFPPEVAVFEPSEAEISHTQKATLV | |
| | | CLATGFYPDHVELSWWVNGKEVHSGVCTDPQPLKEQPALQDSRYALSSR | |
| | | LRVSATFWQNPRNHFRCQVQFYGLSENDEWTQDRAKPVTQIVSAEAWGR | |
| | | ASDKTHTCPPCPAPELLGPSVFLFPPKPKDTLMISRTPEVTCVVVDVSH | |
| | | EDPEVKFNWYVDGVEVHNAKTKPREEQYNSTYRVVSVLTVLHQDWLNGK | |
| | | EYKCKVSNKALPAPIEKTISKAKGQPREPQVCTLPPSREEMTKNQVSLS | |
| | | CAVKGFYPSDIAVEWESNGQPENNYKTTPPVLDSDGSFFLVSKLTVDKS | |
| | | RWQQGNVFSCSVMHEALHNRFTQKSLSLSPGK | |
| | 3^{rd} | EIVLTQSPATLSLSPGERATLSCRASSSVSYMHWYQQKPGQAPRPWIYA | 223 |
| | chain | TSNLASGIPARFSGSRSGTDYTLTISSLEPEDFAVYYCQQWSSNTLTFG | |
| | | GGTKVEIKRTVAAPSVFIFPPSDEQLKSGTASVVCLLNNFYPREAKVQW | |
| | | KVDNALQSGNSQESVTEQDSKDSTYSLSSTLTLSKADYEKHKVYACEVT | |
| | | HQGLSSPVTKSFNRGEC | |
| | 4^{th} | DIVMTQSPDSLAVSLGERATINCKSSQSVLYSSNNRNYLAWYQQKPGQP | 224 |
| | chain | PKLLINQASTRASGVPDRFSGSGSGTEFTLIISSLHAEDVAIYYCQQYY | |
| | | TPPLAFGGGTKLEIKPDIQNPDPAVYQLRDSKSSDKSVCLFTDFDSQTQ | |
| | | VSQSKDSDVYITDKCVLDMRSMDFKSNSAVAWSQKSDFACANAFQNSII | |
| | | PEDTFFPSPESS | |
| Ly2064 | 1^{st} | QVQLVQSGAEVKKPGASVKVSCKASGYTFTSYVMHWVRQKPGQGLEWIG | 225 |
| | chain | YINPYNEGTESTDKFKGRATMTSDKSTSTVYMELSSLRSEDTAVYYCAS | |
| | | IYYGYEGTYFGVWGQGTLVTVSSASTKGPSVFPLAPSSKSTSGGTAALG | |
| | | CLVKDYFPEPVTVSWNSGALTSGVHTFPAVLQSSGLYSLSSVVTVPSSS | |
| | | LGTQTYICNVNHKPSNTKVDKKVEPKSCDKTHTCPPCPAPELLGPSVFL | |
| | | FPPKPKDTLMISRTPEVTCVVVDVSHEDPEVKFNWYVDGVEVHNAKTKP | |
| | | REEQYNSTYRVVSVLTVLHQDWLNGKEYKCKVSNKALPAPIEKTISKAK | |
| | | GQPREPQVYTLPPCREEMTKNQVSLWCLVKGFYPSDIAVEWESNGQPEN | |
| | | NYKTTPPVLDSDGSFFLYSKLTVDKSRWQQGNVFSCSVMHEALHNHYTQ | |
| | | KSLSLSPGK | |
| | 2^{nd} | QVQLVQSGAEVKKPGASVKVSCKASGYTFTSYVMHWVRQKPGQGLEWIG | 226 |
| | chain | YINPYNEGTESTDKFKGRATMTSDKSTSTVYMELSSLRSEDTAVYYCAS | |
| | | IYYGYEGTYFGVWGQGTLVTVSSASTKGPSVFPLAPSSKSTSGGTAALG | |
| | | CLVKDYFPEPVTVSWNSGALTSGVHTFPAVLQSSGLYSLSSVVTVPSSS | |
| | | LGTQTYICNVNHKPSNTKVDKKVEPKSCGGGGSGGGGSGGGGSGGGGSK | |
| | | VQLVESGGGLVKPGGSLRLSCAASGFTFSNAWMNWVRQAPGKGLEWVGR | |
| | | IKRKTDGETTDYAAPVKGRFSISRDDSKNTLYLQMNSLKTEDTAVYYCA | |
| | | GSNRAFDIWGQGTMVTVSADLKNVFPPEVAVFEPSEAEISHTQKATLVC | |
| | | LATGFYPDHVELSWWVNGKEVHSGVCTDPQPLKEQPALQDSRYALSSRL | |
| | | RVSATFWQNPRNHFRCQVQFYGLSENDEWTQDRAKPVTQIVSAEAWGRA | |
| | | SDKTHTCPPCPAPELLGPSVFLFPPKPKDTLMISRTPEVTCVVVDVSHE | |
| | | DPEVKFNWYVDGVEVHNAKTKPREEQYNSTYRVVSVLTVLHQDWLNGKE | |
| | | YKCKVSNKALPAPIEKTISKAKGQPREPQVYTLPPSREEMTKNQVSLSC | |
| | | AVKGFYPSDIAVEWESNGQPENNYKTTPPVLDSDGSFFLVSKLTVDKSR | |
| | | WQQGNVFSCSVMHEALHNRFTQKSLSLSPGK | |
| | 3^{rd} | EIVLTQSPATLSLSPGERATLSCRASSSVSYMHWYQQKPGQAPRPWIYA | 227 |
| | chain | TSNLASGIPARFSGSRSGTDYTLTISSLEPEDFAVYYCQQWSSNTLTFG | |
| | | GGTKVEIKRTVAAPSVFIFPPSDEQLKSGTASVVCLLNNFYPREAKVQW | |
| | | KVDNALQSGNSQESVTEQDSKDSTYSLSSTLTLSKADYEKHKVYACEVT | |
| | | HQGLSSPVTKSFNRGEC | |
| | 4^{th} | DIVMTQSPDSLAVSLGERATINCKSSQSVLYSSNNRNYLAWYQQKPGQP | 228 |
| | chain | PKLLINQASTRASGVPDRFSGSGSGTEFTLIISSLHAEDVAIYYCQQYY | |
| | | TPPLAFGGGTKLEIKPDIQNPDPAVYQLRDSKSSDKSVCLFTDFDSQTQ | |
| | | VSQSKDSDVYITDKCVLDMRSMDFKSNSAVAWSQKSDFACANAFQNSII | |
| | | PEDTFFPSPESS | |

### Characterization of Anti-B7H3/CD47 Bi-Specific Antibodies

[0343] These bispecific antibodies are to be evaluated for their in vitro and in vivo activity, including binding to target antigen (B7H3 and CD47), antagonistic activity in B7H3 and CD47 reporter assay system, activation of anti-tumor activity in mouse models.

### Example 8: Anti-B7H3/CD3 Bi-Specific Antibodies

[0344] Anti-B7H3/CD3 bi-specific antibodies were produced using the anti-B7H3 antibodies Ly1612 (B7H3 Ab1), anta-CD3 antibody Ly305 (CD3 Ab) and CD3 Ab2. The amino acid sequences of the parent antibodies are provided in Table 1 above.

[0345] cDNAs encoding the V_{H} and V_{L} chains of these parent antibodies were used as the starting materials for making the bi-specific antibodies. CHO-cell transient expression was carried out with plasmids configured for expressing polypeptide chains of the bi-specific antibodies. These antibodies were purified by protein A affinity chromatography.

[0346] The amino acid sequences of the polypeptide chains of the bi-specific antibodies are provided in Table 8 below:

TABLE 8
Exemplary Anti-B7H3/CD3 Bi-Specific Antibodies

| | | | SED ID |
|---|---|---|---|
| Antibody Clones | | Amino acid sequence | NO: |
| Ly1900 | 1^{st} | QVQLVQSGAEVKKPGASVKVSCKASGYTFTSYVMHWVRQKPGQGLEWIG | 229 |
| | chain | YINPYNEGTESTDKFKGRATMTSDKSTSTVYMELSSLRSEDTAVYYCAS | |
| | | IYYGYEGTYFGVWGQGTLVTVSSASTKGPSVFPLAPSSKSTSGGTAALG | |
| | | CLVKDYFPEPVTVSWNSGALTSGVHTFPAVLQSSGLYSLSSVVTVPSSS | |
| | | LGTQTYICNVNHKPSNTKVDKKVEPKSCDKTHTCPPCPAPEAAGPSVFL | |
| | | FPPKPKDTLMISRTPEVTCVVVDVSHEDPEVKFNWYVDGVEVHNAKTKP | |
| | | REEQYNSTYRVVSVLTVLHQDWLNGKEYKCKVSNKALPAPIEKTISKAK | |
| | | GQPREPQVYTLPPSREEMTKNQVSLWCLVKGFYPSDIAVEWESNGQPEN | |
| | | NYKTTPPVLDSDGSFFLYSKLTVDKSRWQQGNVFSCSVMHEALHNHYTQ | |
| | | KSLSLSPGK | |
| | 2^{nd} | QVQLVQSGAEVKKPGASVKVSCKASGYTFTSYVMHWVRQKPGQGLEWIG | 230 |
| | chain | YINPYNEGTESTDKFKGRATMTSDKSTSTVYMELSSLRSEDTAVYYCAS | |
| | | IYYGYEGTYFGVWGQGTLVTVSSASTKGPSVFPLAPSSKSTSGGTAALG | |
| | | CLVKDYFPEPVTVSWNSGALTSGVHTFPAVLQSSGLYSLSSVVTVPSSS | |
| | | LGTQTYICNVNHKPSNTKVDKKVEPKSCGGGGSGGGGSGGGGSGGGGSE | |
| | | VQLVESGGGLVQPGGSLRLSCAASGFTFSTYAMNWVRQAPGKGLEWVGR | |
| | | IRSKYNNYATYYADSVKGRFTISRDDSKNSLYLQMNSLKTEDTAVYYCV | |
| | | RHGNFGNSYVSWFAYWGQGTLVTVSSASVAAPSVFIFPPSDEQLKSGTA | |
| | | SVVCLLNNFYPREAKVQWKVDNALQSGNSQESVTEQDSKDSTYSLSSTL | |
| | | TLSKADYEKHKVYACEVTHQGLSSPVTKSFNRGECDKTHTCPPCPAPEA | |
| | | AGPSVFLFPPKPKDTLMISRTPEVTCVVVDVSHEDPEVKFNWYVDGVEV | |
| | | HNAKTKPREEQYNSTYRVVSVLTVLHQDWLNGKEYKCKVSNKALPAPIE | |
| | | KTISKAKGQPREPQVYTLPPSREEMTKNQVSLSCAVKGFYPSDIAVEWE | |
| | | SNGQPENNYKTTPPVLDSDGSFFLVSKLTVDKSRWQQGNVFSCSVMHEA | |
| | | LHNRFTQKSLSLSPGK | |
| | 3^{rd} | EIVLTQSPATLSLSPGERATLSCRASSSVSYMHWYQQKPGQAPRPWIYA | 231 |
| | chain | TSNLASGIPARFSGSRSGTDYTLTISSLEPEDFAVYYCQQWSSNTLTFG | |
| | | GGTKVEIKRTVAAPSVFIFPPSDEQLKSGTASVVCLLNNFYPREAKVQW | |
| | | KVDNALQSGNSQESVTEQDSKDSTYSLSSTLTLSKADYEKHKVYACEVT | |
| | | HQGLSSPVTKSFNRGEC | |
| | 4^{th} | QAVVTQEPSLTVSPGGTVTLTCRSSTGAVTTSNYANWVQQKPGQAPRGL | 232 |
| | chain | IGGTNKRAPWTPARFSGSLLGGKAALTITGAQAEDEADYYCALWYSNLW | |
| | | VFGGGTKLTVLSSASTKGPSVFPLAPSSKSTSGGTAALGCLVKDYFPEP | |
| | | VTVSWNSGALTSGVHTFPAVLQSSGLYSLSSVVTVPSSSLGTQTYICNV | |
| | | NHKPSNTKVDKKVEPKSC | |
| Ly1902 | 1^{st} | QVQLVQSGAEVKKPGASVKVSCKASGYTFTSYVMHWVRQKPGQGLEWIG | 233 |
| | chain | YINPYNEGTESTDKFKGRATMTSDKSTSTVYMELSSLRSEDTAVYYCAS | |
| | | IYYGYEGTYFGVWGQGTLVTVSSASTKGPSVFPLAPSSKSTSGGTAALG | |
| | | CLVKDYFPEPVTVSWNSGALTSGVHTFPAVLQSSGLYSLSSVVTVPSSS | |
| | | LGTQTYICNVNHKPSNTKVDKKVEPKSCDKTHTCPPCPAPEAAGPSVFL | |
| | | FPPKPKDTLMISRTPEVTCVVVDVSHEDPEVKFNWYVDGVEVHNAKTKP | |
| | | REEQYNSTYRVVSVLTVLHQDWLNGKEYKCKVSNKALPAPIEKTISKAK | |
| | | GQPREPQVYTLPPSREEMTKNQVSLWCLVKGFYPSDIAVEWESNGQPEN | |
| | | NYKTTPPVLDSDGSFFLYSKLTVDKSRWQQGNVFSCSVMHEALHNHYTQ | |
| | | KSLSLSPGK | |
| | 2^{nd} | QVQLVQSGAEVKKPGASVKVSCKASGYTFTSYVMHWVRQKPGQGLEWIG | 234 |
| | chain | YINPYNEGTESTDKFKGRATMTSDKSTSTVYMELSSLRSEDTAVYYCAS | |
| | | IYYGYEGTYFGVWGQGTLVTVSSASTKGPSVFPLAPSSKSTSGGTAALG | |
| | | CLVKDYFPEPVTVSWNSGALTSGVHTFPAVLQSSGLYSLSSVVTVPSSS | |
| | | LGTQTYICNVNHKPSNTKVDKKVEPKSCGGGGSGGGGSGGGGSGGGGSQ | |
| | | AVVTQEPSLTVSPGGTVTLTCRSSTGAVTTSNYANWVQQKPGQAPRGLI | |
| | | GGTNKRAPWTPARFSGSLLGGKAALTITGAQAEDEADYYCALWYSNLWV | |
| | | FGGGTKLTVLGGGGSGGGGSGGGGSGGGGSEVQLVESGGGLVQPGGSLR | |
| | | LSCAASGFTFSTYAMNWVRQAPGKGLEWVGRIRSKYNNYATYYADSVKG | |
| | | RFTISRDDSKNSLYLQMNSLKTEDTAVYYCVRHGNFGNSYVSWFAYWGQ | |
| | | GTLVTVSSDKTHTCPPCPAPEAAGPSVFLFPPKPKDTLMISRTPEVTCV | |
| | | VVDVSHEDPEVKFNWYVDGVEVHNAKTKPREEQYNSTYRVVSVLTVLHQ | |
| | | DWLNGKEYKCKVSNKALPAPIEKTISKAKGQPREPQVYTLPPSREEMTK | |
| | | NQVSLSCAVKGFYPSDIAVEWESNGQPENNYKTTPPVLDSDGSFFLVSK | |
| | | LTVDKSRWQQGNVFSCSVMHEALHNRFTQKSLSLSPGK | |
| | 3^{rd} | EIVLTQSPATLSLSPGERATLSCRASSSVSYMHWYQQKPGQAPRPWIYA | 235 |
| | chain | TSNLASGIPARFSGSRSGTDYTLTISSLEPEDFAVYYCQQWSSNTLTFG | |
| | | GGTKVEIKRTVAAPSVFIFPPSDEQLKSGTASVVCLLNNFYPREAKVQW | |
| | | KVDNALQSGNSQESVTEQDSKDSTYSLSSTLTLSKADYEKHKVYACEVT | |
| | | HQGLSSPVTKSFNRGEC | |
| Ly1904 | 1^{st} | QVQLVQSGAEVKKPGASVKVSCKASGYTFTSYVMHWVRQKPGQGLEWIG | 236 |
| | chain | YINPYNEGTESTDKFKGRATMTSDKSTSTVYMELSSLRSEDTAVYYCAS | |
| | | IYYGYEGTYFGVWGQGTLVTVSSASTKGPSVFPLAPSSKSTSGGTAALG | |
| | | CLVKDYFPEPVTVSWNSGALTSGVHTFPAVLQSSGLYSLSSVVTVPSSS | |
| | | LGTQTYICNVNHKPSNTKVDKKVEPKSCGGGGSGGGGSGGGGSGGGGSE | |
| | | VQLVESGGGLVQPGGSLRLSCAASGFTFSTYAMNWVRQAPGKGLEWVGR | |
| | | IRSKYNNYATYYADSVKGRFTISRDDSKNSLYLQMNSLKTEDTAVYYCV | |
| | | RHGNFGNSYVSWFAYWGQGTLVTVSSPAPEAAGPSVFLFPPKPKDTLMI | |
| | | SRTPEVTCVVVDVSHEDPEVKFNWYVDGVEVHNAKTKPREEQYNSTYRV | |
| | | VSVLTVLHQDWLNGKEYKCKVSNKALPAPIEKTISKAKGQPREPQVYTL | |
| | | PPSREEMTKNQVSLWCLVKGFYPSDIAVEWESNGQPENNYKTTPPVLDS | |
| | | DGSFFLYSKLTVDKSRWQQGNVFSCSVMHEALHNHYTQKSLSLSPGK | |
| | 2^{nd} | QVQLVQSGAEVKKPGASVKVSCKASGYTFTSYVMHWVRQKPGQGLEWIG | 237 |
| | chain | YINPYNEGTESTDKFKGRATMTSDKSTSTVYMELSSLRSEDTAVYYCAS | |
| | | IYYGYEGTYFGVWGQGTLVTVSSASTKGPSVFPLAPSSKSTSGGTAALG | |
| | | CLVKDYFPEPVTVSWNSGALTSGVHTFPAVLQSSGLYSLSSVVTVPSSS | |
| | | LGTQTYICNVNHKPSNTKVDKKVEPKSCGGGGSGGGGSGGGGSGGGGSQ | |
| | | AVVTQEPSLTVSPGGTVTLTCRSSTGAVTTSNYANWVQQKPGQAPRGLI | |
| | | GGTNKRAPWTPARFSGSLLGGKAALTITGAQAEDEADYYCALWYSNLWV | |
| | | FGGGTKLTVLPAPEAAGPSVFLFPPKPKDTLMISRTPEVTCVVVDVSHE | |
| | | DPEVKFNWYVDGVEVHNAKTKPREEQYNSTYRVVSVLTVLHQDWLNGKE | |
| | | YKCKVSNKALPAPIEKTISKAKGQPREPQVYTLPPSREEMTKNQVSLSC | |
| | | AVKGFYPSDIAVEWESNGQPENNYKTTPPVLDSDGSFFLVSKLTVDKSR | |
| | | WQQGNVFSCSVMHEALHNRFTQKSLSLSPGK | |
| | 3^{rd} | EIVLTQSPATLSLSPGERATLSCRASSSVSYMHWYQQKPGQAPRPWIYA | 238 |
| | chain | TSNLASGIPARFSGSRSGTDYTLTISSLEPEDFAVYYCQQWSSNTLTFG | |
| | | GGTKVEIKRTVAAPSVFIFPPSDEQLKSGTASVVCLLNNFYPREAKVQW | |
| | | KVDNALQSGNSQESVTEQDSKDSTYSLSSTLTLSKADYEKHKVYACEVT | |
| | | HQGLSSPVTKSFNRGEC | |
| Ly1901 | 1^{st} | QVQLVQSGAEVKKPGASVKVSCKASGYTFTSYVMHWVRQKPGQGLEWIG | 239 |
| | chain | YINPYNEGTESTDKFKGRATMTSDKSTSTVYMELSSLRSEDTAVYYCAS | |
| | | IYYGYEGTYFGVWGQGTLVTVSSASTKGPSVFPLAPSSKSTSGGTAALG | |
| | | CLVKDYFPEPVTVSWNSGALTSGVHTFPAVLQSSGLYSLSSVVTVPSSS | |
| | | LGTQTYICNVNHKPSNTKVDKKVEPKSCGGGGSGGGGSGGGGSGGGGSE | |
| | | VQLVESGGGLVQPGGSLRLSCAASGFTFSTYAMNWVRQAPGKGLEWVGR | |
| | | IRSKYNNYATYYADSVKGRFTISRDDSKNSLYLQMNSLKTEDTAVYYCV | |
| | | RHGNFGNSYVSWFAYWGQGTLVTVSSGQPREPQVYTLPPSREEMTKNQV | |
| | | SLWCLVKGFYPSDIAVEWESNGQPENNYKTTPPVLDSDGSFFLYSKLTV | |
| | | DKSRWQQGNVFSCSVMHEALHNHYTQKSLSLSPGK | |
| | 2^{nd} | QVQLVQSGAEVKKPGASVKVSCKASGYTFTSYVMHWVRQKPGQGLEWIG | 240 |
| | chain | YINPYNEGTESTDKFKGRATMTSDKSTSTVYMELSSLRSEDTAVYYCAS | |
| | | IYYGYEGTYFGVWGQGTLVTVSSASTKGPSVFPLAPSSKSTSGGTAALG | |
| | | CLVKDYFPEPVTVSWNSGALTSGVHTFPAVLQSSGLYSLSSVVTVPSSS | |
| | | LGTQTYICNVNHKPSNTKVDKKVEPKSCGGGGSGGGGSGGGGSGGGGSQ | |
| | | AVVTQEPSLTVSPGGTVTLTCRSSTGAVTTSNYANWVQQKPGQAPRGLI | |
| | | GGTNKRAPWTPARFSGSLLGGKAALTITGAQAEDEADYYCALWYSNLWV | |
| | | FGGGTKLTVLGQPREPQVYTLPPSREEMTKNQVSLSCAVKGFYPSDIAV | |
| | | EWESNGQPENNYKTTPPVLDSDGSFFLVSKLTVDKSRWQQGNVFSCSVM | |
| | | HEALHNHYTQKSLSLSPGK | |
| | 3^{rd} | EIVLTQSPATLSLSPGERATLSCRASSSVSYMHWYQQKPGQAPRPWIYA | 241 |
| | chain | TSNLASGIPARFSGSRSGTDYTLTISSLEPEDFAVYYCQQWSSNTLTFG | |
| | | GGTKVEIKRTVAAPSVFIFPPSDEQLKSGTASVVCLLNNFYPREAKVQW | |
| | | KVDNALQSGNSQESVTEQDSKDSTYSLSSTLTLSKADYEKHKVYACEVT | |
| | | HQGLSSPVTKSFNRGEC | |
| Ly1903 | 1^{st} | QVQLVQSGAEVKKPGASVKVSCKASGYTFTSYVMHWVRQKPGQGLEWIG | 242 |
| | chain | YINPYNEGTESTDKFKGRATMTSDKSTSTVYMELSSLRSEDTAVYYCAS | |
| | | IYYGYEGTYFGVWGQGTLVTVSSASTKGPSVFPLAPSSKSTSGGTAALG | |
| | | CLVKDYFPEPVTVSWNSGALTSGVHTFPAVLQSSGLYSLSSVVTVPSSS | |
| | | LGTQTYICNVNHKPSNTKVDKKVEPKSCDKTHTCPPCPAPEAAGPSVFL | |
| | | FPPKPKDTLMISRTPEVTCVVVDVSHEDPEVKFNWYVDGVEVHNAKTKP | |
| | | REEQYNSTYRVVSVLIVLHQDWLNGKEYKCKVSNKALPAPIEKTISKAK | |
| | | GQPREPQVYTLPPSREEMTKNQVSLWCLVKGFYPSDIAVEWESNGQPEN | |
| | | NYKTTPPVLDSDGSFFLYSKLTVDKSRWQQGNVFSCSVMHEALHNHYTQ | |
| | | KSLSLSPGK | |
| | 2^{nd} | QVQLVQSGAEVKKPGASVKVSCKASGYTFTSYVMHWVRQKPGQGLEWIG | 243 |
| | chain | YINPYNEGTESTDKFKGRATMTSDKSTSTVYMELSSLRSEDTAVYYCAS | |
| | | IYYGYEGTYFGVWGQGTLVTVSSASTKGPSVFPLAPSSKSTSGGTAALG | |
| | | CLVKDYFPEPVTVSWNSGALTSGVHTFPAVLQSSGLYSLSSVVTVPSSS | |
| | | LGTQTYICNVNHKPSNTKVDKKVEPKSCDKTHTCPPCPAPEAAGPSVFL | |
| | | FPPKPKDTLMISRTPEVTCVVVDVSHEDPEVKFNWYVDGVEVHNAKTKP | |
| | | REEQYNSTYRVVSVLTVLHQDWLNGKEYKCKVSNKALPAPIEKTISKAK | |
| | | GQPREPQVYTLPPSREEMTKNQVSLSCAVKGFYPSDIAVEWESNGQPEN | |
| | | NYKTTPPVLDSDGSFFLVSKLTVDKSRWQQGNVFSCSVMHEALHNRFTQ | |
| | | KSLSLSPGGGGGSGGGGSGGGGSGGGGSDIQMTQSPSTLSASVGDRVTI | |
| | | TCSASSSVSYMNWYQQKPGKAPKLLIYDTSKLASGVPSRFSGSGSGTEF | |
| | | TLTISSLQPDDFATYYCQQWSSNPFTFGQGTKLEIKGGGGSGGGGSGGG | |
| | | GSGGGGSQVQLVQSGAEVKKPGASVKVSCKASGYTFTRYTMHWVRQAPG | |
| | | QGLEWMGYINPSRGYTNYNQKFKDRVTMTRDTSTSTVYMELSSLRSEDT | |
| | | AVYYCARYYDDHYCLDYWGQGTLVTVSS | |
| | 3^{rd} | EIVLTQSPATLSLSPGERATLSCRASSSVSYMHWYQQKPGQAPRPWIYA | 244 |
| | chain | TSNLASGIPARFSGSRSGTDYTLTISSLEPEDFAVYYCQQWSSNTLTFG | |
| | | GGTKVEIKRTVAAPSVFIFPPSDEQLKSGTASVVCLLNNFYPREAKVQW | |
| | | KVDNALQSGNSQESVTEQDSKDSTYSLSSTLTLSKADYEKHKVYACEVT | |
| | | HQGLSSPVTKSFNRGEC | |

### Characterization of Anti-B7H3/CD3 Bi-Specific Antibodies

[0347] These bispecific antibodies are evaluated for their in vitro and in vivo activity, including binding to target antigen (B7H-3 and CD3), agonistic activity in CD3 reporter assay system, activation of immune cells, anti-tumor activity in mouse models.

### Example 9: Anti-B7H3/CD3/CD137 Tri-Specific Antibodies

[0348] Anti-B7H3/CD3/CD137 tri-specific were produced using the anti-B7H3 antibodies Ly1612 (B7H3 Ab1), anti-CD3 antibody Ly305 (CD3 Ab1) and CD3 Ab2, and anti-CD137 antibody Ly1630 (CD137 Ab1). The sequences of the parent antibodies are provided in Table 1 above.

[0349] cDNAs encoding the V_{H} and V_{L} chains of these parent antibodies were used as the starting materials for making the tri-specific antibodies. CHO-cell transient expression was carried out with plasmids configured for expressing polypeptide chains of the tri-specific antibodies. These antibodies were purified by protein A affinity chromatography.

[0350] The amino acid sequences of the polypeptide chains of the tri-specific antibodies are provided in Table 9 below:

TABLE 9
Exemplary Anti-B7H3/CD3/CD137 Tri-Specific Antibodies

| | | | SED ID |
|---|---|---|---|
| Antibody Clones | | Amino acid sequence | NO: |
| Ly1785 | 1^{st} | QVQLVQSGAEVKKPGASVKVSCKASGYTFTSYVMHWVRQKPGQGLEWIG | 245 |
| | chain | YINPYNEGTESTDKFKGRATMTSDKSTSTVYMELSSLRSEDTAVYYCAS | |
| | | IYYGYEGTYFGVWGQGTLVTVSSASTKGPSVFPLAPSSKSTSGGTAALG | |
| | | CLVKDYFPEPVTVSWNSGALTSGVHTFPAVLQSSGLYSLSSVVTVPSSS | |
| | | LGTQTYICNVNHKPSNTKVDKKVEPKSCGGGGSGGGGSGGGGSGGGGSE | |
| | | VQLVESGGGLVQPGGSLRLSCAASGFTFSTYAMNWVRQAPGKGLEWVGR | |
| | | IRSKYNNYATYYADSVKGRFTISRDDSKNSLYLQMNSLKTEDTAVYYCV | |
| | | RHGNFGNSYVSWFAYWGQGTLVTVSSPAPELLGPSVFLFPPKPKDTLMI | |
| | | SRTPEVTCVVVDVSHEDPEVKFNWYVDGVEVHNAKTKPREEQYNSTYRV | |
| | | VSVLTVLHQDWLNGKEYKCKVSNKALPAPIEKTISKAKGQPREPQVYTL | |
| | | PPSREEMTKNQVSLWCLVKGFYPSDIAVEWESNGQPENNYKTTPPVLDS | |
| | | DGSFFLYSKLTVDKSRWQQGNVFSCSVMHEALHNHYTQKSLSLSPGK | |
| | 2^{nd} | QVQLVQSGAEVKKPGASVKVSCKASGYTFAGFEMHWVRQAPGQGLEWMG | 246 |
| | chain | AIDPKTGGTDYNQKFKDRVTMTRDTSISTAYMELSRLRSDDTAVYYCAR | |
| | | DLGYFDVWGQGTLVTVSSASVAAPSVFIFPPSDEQLKSGTASVVCLLNN | |
| | | FYPREAKVQWKVDNALQSGNSQESVTEQDSKDSTYSLSSTLTLSKADYE | |
| | | KHKVYACEVTHQGLSSPVTKSFNRGECGGGGSGGGGSGGGGSGGGGSQA | |
| | | VVTQEPSLTVSPGGTVTLTCRSSTGAVTTSNYANWVQQKPGQAPRGLIG | |
| | | GTNKRAPWTPARFSGSLLGGKAALTITGAQAEDEADYYCALWYSNLWVF | |
| | | GGGTKLTVLPAPELLGPSVFLFPPKPKDTLMISRTPEVTCVVVDVSHED | |
| | | PEVKFNWYVDGVEVHNAKTKPREEQYNSTYRVVSVLIVLHQDWLNGKEY | |
| | | KCKVSNKALPAPIEKTISKAKGQPREPQVYTLPPSREEMTKNQVSLSCA | |
| | | VKGFYPSDIAVEWESNGQPENNYKTTPPVLDSDGSFFLVSKLTVDKSRW | |
| | | QQGNVFSCSVMHEALHNRFTQKSLSLSPGK | |
| | 3^{rd} | EIVLTQSPATLSLSPGERATLSCRASSSVSYMHWYQQKPGQAPRPWIYA | 247 |
| | chain | TSNLASGIPARFSGSRSGTDYTLTISSLEPEDFAVYYCQQWSSNTLTFG | |
| | | GGTKVEIKRTVAAPSVFIFPPSDEQLKSGTASVVCLLNNFYPREAKVQW | |
| | | KVDNALQSGNSQESVTEQDSKDSTYSLSSTLTLSKADYEKHKVYACEVT | |
| | | HQGLSSPVTKSFNRGEC | |
| | 4^{th} | DIQMTQSPSSLSASVGDRVTITCRASQDIRSNLNWYQQKPGGAVKLLIY | 248 |
| | chain | YTSRLHSGVPSRFSGSGSGTDYTLTISSLQPEDFATYFCQQSEKLPRTF | |
| | | GGGTKVEIRSSASTKGPSVFPLAPSSKSTSGGTAALGCLVKDYFPEPVT | |
| | | VSWNSGALTSGVHTFPAVLQSSGLYSLSSVVTVPSSSLGTQTYICNVNH | |
| | | KPSNTKVDKKVEPKSC | |
| Ly1666 | 1^{st} | QVQLVQSGAEVKKPGASVKVSCKASGYTFTSYVMHWVRQKPGQGLEWIG | 249 |
| | chain | YINPYNEGTESTDKFKGRATMTSDKSTSTVYMELSSLRSEDTAVYYCAS | |
| | | IYYGYEGTYFGVWGQGTLVTVSSASTKGPSVFPLAPSSKSTSGGTAALG | |
| | | CLVKDYFPEPVTVSWNSGALTSGVHTFPAVLQSSGLYSLSSVVTVPSSS | |
| | | LGTQTYICNVNHKPSNTKVDKKVEPKSCDKTHTCPPCPAPELLGPSVFL | |
| | | FPPKPKDTLMISRTPEVTCVVVDVSHEDPEVKFNWYVDGVEVHNAKTKP | |
| | | REEQYNSTYRVVSVLTVLHQDWLNGKEYKCKVSNKALPAPIEKTISKAK | |
| | | GQPREPQVYTLPPCREEMTKNQVSLWCLVKGFYPSDIAVEWESNGQPEN | |
| | | NYKTTPPVLDSDGSFFLYSKLTVDKSRWQQGNVFSCSVMHEALHNHYTQ | |
| | | KSLSLSPGK | |
| | 2^{nd} | QVQLVQSGAEVKKPGASVKVSCKASGYTFAGFEMHWVRQAPGQGLEWMG | 250 |
| | chain | AIDPKTGGTDYNQKFKDRVTMTRDTSISTAYMELSRLRSDDTAVYYCAR | |
| | | DLGYFDVWGQGTLVTVSSASTKGPSVFPLAPSSKSTSGGTAALGCLVKD | |
| | | YFPEPVTVSWNSGALTSGVHTFPAVLQSSGLYSLSSVVTVPSSSLGTQT | |
| | | YICNVNHKPSNTKVDKKVEPKSCGGGGSGGGGSGGGGSGGGGSEVQLVE | |
| | | SGGGLVQPGGSLRLSCAASGFTFSTYAMNWVRQAPGKGLEWVGRIRSKY | |
| | | NNYATYYADSVKGRFTISRDDSKNSLYLQMNSLKTEDTAVYYCVRHGNF | |
| | | GNSYVSWFAYWGQGTLVTVSSASVAAPSVFIFPPSDEQLKSGTASVVCL | |
| | | LNNFYPREAKVQWKVDNALQSGNSQESVTEQDSKDSTYSLSSTLTLSKA | |
| | | DYEKHKVYACEVTHQGLSSPVTKSFNRGECDKTHTCPPCPAPELLGPSV | |
| | | FLFPPKPKDTLMISRTPEVTCVVVDVSHEDPEVKFNWYVDGVEVHNAKT | |
| | | KPREEQYNSTYRVVSVLTVLHQDWLNGKEYKCKVSNKALPAPIEKTISK | |
| | | AKGQPREPQVCTLPPSREEMTKNQVSLSCAVKGFYPSDIAVEWESNGQP | |
| | | ENNYKTTPPVLDSDGSFFLVSKLTVDKSRWQQGNVFSCSVMHEALHNRF | |
| | | TQKSLSLSPGK | |
| | 3^{rd} | EIVLTQSPATLSLSPGERATLSCRASSSVSYMHWYQQKPGQAPRPWIYA | 251 |
| | chain | TSNLASGIPARFSGSRSGTDYTLTISSLEPEDFAVYYCQQWSSNTLTFG | |
| | | GGTKVEIKRTVAAPSVFIFPPSDEQLKSGTASVVCLLNNFYPREAKVQW | |
| | | KVDNALQSGNSQESVTEQDSKDSTYSLSSTLTLSKADYEKHKVYACEVT | |
| | | HQGLSSPVTKSFNRGEC | |
| | 4^{th} | DIQMTQSPSSLSASVGDRVTITCRASQDIRSNLNWYQQKPGGAVKLLIY | 252 |
| | chain | YTSRLHSGVPSRFSGSGSGTDYTLTISSLQPEDFATYFCQQSEKLPRTF | |
| | | GGGTKVEIRRTVAAPSVFIFPPSDEQLKSGTASVVCLLNNFYPREAKVQ | |
| | | WKVDNALQSGNSQESVTEQDSKDSTYSLSSTLTLSKADYEKHKVYACEV | |
| | | THQGLSSPVTKSFNRGECGGGGSGGGGSGGGGSGGGGSQAVVTQEPSLT | |
| | | VSPGGTVTLTCRSSTGAVTTSNYANWVQQKPGQAPRGLIGGTNKRAPWT | |
| | | PARFSGSLLGGKAALTITGAQAEDEADYYCALWYSNLWVFGGGTKLTVL | |
| | | SSASTKGPSVFPLAPSSKSTSGGTAALGCLVKDYFPEPVTVSWNSGALT | |
| | | SGVHTFPAVLQSSGLYSLSSVVTVPSSSLGTQTYICNVNHKPSNTKVDK | |
| | | KVEPKSC | |
| Ly1793 | 1^{st} | QVQLVQSGAEVKKPGASVKVSCKASGYTFTSYVMHWVRQKPGQGLEWIG | 253 |
| | chain | YINPYNEGTESTDKFKGRATMTSDKSTSTVYMELSSLRSEDTAVYYCAS | |
| | | IYYGYEGTYFGVWGQGTLVTVSSASTKGPSVFPLAPSSKSTSGGTAALG | |
| | | CLVKDYFPEPVTVSWNSGALTSGVHTFPAVLQSSGLYSLSSVVTVPSSS | |
| | | LGTQTYICNVNHKPSNTKVDKKVEPKSCDKTHTCPPCPAPEAAGPSVFL | |
| | | FPPKPKDTLMISRTPEVTCVVVDVSHEDPEVKFNWYVDGVEVHNAKTKP | |
| | | REEQYNSTYRVVSVLTVLHQDWLNGKEYKCKVSNKALPAPIEKTISKAK | |
| | | GQPREPQVYTLPPSREEMTKNQVSLWCLVKGFYPSDIAVEWESNGQPEN | |
| | | NYKTTPPVLDSDGSFFLYSKLTVDKSRWQQGNVFSCSVMHEALHNHYTQ | |
| | | KSLSLSPGGGGGSGGGGSGGGGSGGGGSQVQLVQSGAEVKKPGASVKVS | |
| | | CKASGYTFAGFEMHWVRQAPGQGLEWMGAIDPKTGGTDYNQKFKDRVTM | |
| | | TRDTSISTAYMELSRLRSDDTAVYYCARDLGYFDVWGQGTLVTVSSGGG | |
| | | GSGGGGSGGGGSGGGGSDIQMTQSPSSLSASVGDRVTITCRASQDIRSN | |
| | | LNWYQQKPGGAVKLLIYYTSRLHSGVPSRFSGSGSGTDYTLTISSLQPE | |
| | | DFATYFCQQSEKLPRTFGGGTKVEIR | |
| | 2^{nd} | QVQLVQSGAEVKKPGASVKVSCKASGYTFTSYVMHWVRQKPGQGLEWIG | 254 |
| | chain | YINPYNEGTESTDKFKGRATMTSDKSTSTVYMELSSLRSEDTAVYYCAS | |
| | | IYYGYEGTYFGVWGQGTLVTVSSASTKGPSVFPLAPSSKSTSGGTAALG | |
| | | CLVKDYFPEPVTVSWNSGALTSGVHTFPAVLQSSGLYSLSSVVTVPSSS | |
| | | LGTQTYICNVNHKPSNTKVDKKVEPKSCGGGGSGGGGSGGGGSGGGGSE | |
| | | VQLVESGGGLVQPGGSLRLSCAASGFTFSTYAMNWVRQAPGKGLEWVGR | |
| | | IRSKYNNYATYYADSVKGRFTISRDDSKNSLYLQMNSLKTEDTAVYYCV | |
| | | RHGNFGNSYVSWFAYWGQGTLVTVSSASVAAPSVFIFPPSDEQLKSGTA | |
| | | SVVCLLNNFYPREAKVQWKVDNALQSGNSQESVTEQDSKDSTYSLSSTL | |
| | | TLSKADYEKHKVYACEVTHQGLSSPVTKSFNRGECDKTHTCPPCPAPEA | |
| | | AGPSVFLFPPKPKDTLMISRTPEVTCVVVDVSHEDPEVKFNWYVDGVEV | |
| | | HNAKTKPREEQYNSTYRVVSVLIVLHQDWLNGKEYKCKVSNKALPAPIE | |
| | | KTISKAKGQPREPQVYTLPPSREEMTKNQVSLSCAVKGFYPSDIAVEWE | |
| | | SNGQPENNYKTTPPVLDSDGSFFLVSKLTVDKSRWQQGNVFSCSVMHEA | |
| | | LHNRFTQKSLSLSPGGGGGSGGGGSGGGGSGGGGSQVQLVQSGAEVKKP | |
| | | GASVKVSCKASGYTFAGFEMHWVRQAPGQGLEWMGAIDPKTGGTDYNQK | |
| | | FKDRVTMTRDTSISTAYMELSRLRSDDTAVYYCARDLGYFDVWGQGTLV | |
| | | TVSSGGGGSGGGGSGGGGSGGGGSDIQMTQSPSSLSASVGDRVTITCRA | |
| | | SQDIRSNLNWYQQKPGGAVKLLIYYTSRLHSGVPSRFSGSGSGTDYTLT | |
| | | ISSLQPEDFATYFCQQSEKLPRTFGGGTKVEIR | |
| | 3^{rd} | EIVLTQSPATLSLSPGERATLSCRASSSVSYMHWYQQKPGQAPRPWIYA | 255 |
| | chain | TSNLASGIPARFSGSRSGTDYTLTISSLEPEDFAVYYCQQWSSNTLTFG | |
| | | GGTKVEIKRTVAAPSVFIFPPSDEQLKSGTASVVCLLNNFYPREAKVQW | |
| | | KVDNALQSGNSQESVTEQDSKDSTYSLSSTLTLSKADYEKHKVYACEVT | |
| | | HQGLSSPVTKSFNRGEC | |
| | 4^{th} | QAVVTQEPSLTVSPGGTVTLTCRSSTGAVTTSNYANWVQQKPGQAPRGL | 256 |
| | chain | IGGTNKRAPWTPARFSGSLLGGKAALTITGAQAEDEADYYCALWYSNLW | |
| | | VFGGGTKLTVLSSASTKGPSVFPLAPSSKSTSGGTAALGCLVKDYFPEP | |
| | | VTVSWNSGALTSGVHTFPAVLQSSGLYSLSSVVTVPSSSLGTQTYICNV | |
| | | NHKPSNTKVDKKVEPKSC | |
| Ly1794 | 1^{st} | QVQLVQSGAEVKKPGASVKVSCKASGYTFTSYVMHWVRQKPGQGLEWIG | 257 |
| | chain | YINPYNEGTESTDKFKGRATMTSDKSTSTVYMELSSLRSEDTAVYYCAS | |
| | | IYYGYEGTYFGVWGQGTLVTVSSASTKGPSVFPLAPSSKSTSGGTAALG | |
| | | CLVKDYFPEPVTVSWNSGALTSGVHTFPAVLQSSGLYSLSSVVTVPSSS | |
| | | LGTQTYICNVNHKPSNTKVDKKVEPKSCDKTHTCPPCPAPEAAGPSVFL | |
| | | FPPKPKDTLMISRTPEVTCVVVDVSHEDPEVKFNWYVDGVEVHNAKTKP | |
| | | REEQYNSTYRVVSVLTVLHQDWLNGKEYKCKVSNKALPAPIEKTISKAK | |
| | | GQPREPQVYTLPPSREEMTKNQVSLWCLVKGFYPSDIAVEWESNGQPEN | |
| | | NYKTTPPVLDSDGSFFLYSKLTVDKSRWQQGNVFSCSVMHEALHNHYTQ | |
| | | KSLSLSPGK | |
| | 2^{nd} | QVQLVQSGAEVKKPGASVKVSCKASGYTFTSYVMHWVRQKPGQGLEWIG | 258 |
| | chain | YINPYNEGTESTDKFKGRATMTSDKSTSTVYMELSSLRSEDTAVYYCAS | |
| | | IYYGYEGTYFGVWGQGTLVTVSSASTKGPSVFPLAPSSKSTSGGTAALG | |
| | | CLVKDYFPEPVTVSWNSGALTSGVHTFPAVLQSSGLYSLSSVVTVPSSS | |
| | | LGTQTYICNVNHKPSNTKVDKKVEPKSCGGGGSGGGGSGGGGSGGGGSE | |
| | | VQLVESGGGLVQPGGSLRLSCAASGFTFSTYAMNWVRQAPGKGLEWVGR | |
| | | IRSKYNNYATYYADSVKGRFTISRDDSKNSLYLQMNSLKTEDTAVYYCV | |
| | | RHGNFGNSYVSWFAYWGQGTLVTVSSASVAAPSVFIFPPSDEQLKSGTA | |
| | | SVVCLLNNFYPREAKVQWKVDNALQSGNSQESVTEQDSKDSTYSLSSTL | |
| | | TLSKADYEKHKVYACEVTHQGLSSPVTKSFNRGECDKTHTCPPCPAPEA | |
| | | AGPSVFLFPPKPKDTLMISRTPEVTCVVVDVSHEDPEVKFNWYVDGVEV | |
| | | HNAKTKPREEQYNSTYRVVSVLTVLHQDWLNGKEYKCKVSNKALPAPIE | |
| | | KTISKAKGQPREPQVYTLPPSREEMTKNQVSLSCAVKGFYPSDIAVEWE | |
| | | SNGQPENNYKTTPPVLDSDGSFFLVSKLTVDKSRWQQGNVFSCSVMHEA | |
| | | LHNRFTQKSLSLSPGGGGGSGGGGSGGGGSGGGGSQVQLVQSGAEVKKP | |
| | | GASVKVSCKASGYTFAGFEMHWVRQAPGQGLEWMGAIDPKTGGTDYNQK | |
| | | FKDRVTMTRDTSISTAYMELSRLRSDDTAVYYCARDLGYFDVWGQGTLV | |
| | | TVSSGGGGSGGGGSGGGGSGGGGSDIQMTQSPSSLSASVGDRVTITCRA | |
| | | SQDIRSNLNWYQQKPGGAVKLLIYYTSRLHSGVPSRFSGSGSGTDYTLT | |
| | | ISSLQPEDFATYFCQQSEKLPRTFGGGTKVEIR | |
| | 3^{rd} | EIVLTQSPATLSLSPGERATLSCRASSSVSYMHWYQQKPGQAPRPWIYA | 259 |
| | chain | TSNLASGIPARFSGSRSGTDYTLTISSLEPEDFAVYYCQQWSSNTLTFG | |
| | | GGTKVEIKRTVAAPSVFIFPPSDEQLKSGTASVVCLLNNFYPREAKVQW | |
| | | KVDNALQSGNSQESVTEQDSKDSTYSLSSTLTLSKADYEKHKVYACEVT | |
| | | HQGLSSPVTKSFNRGEC | |
| | 4^{th} | QAVVTQEPSLTVSPGGTVTLTCRSSTGAVTTSNYANWVQQKPGQAPRGL | 260 |
| | chain | IGGTNKRAPWTPARFSGSLLGGKAALTITGAQAEDEADYYCALWYSNLW | |
| | | VFGGGTKLTVLSSASTKGPSVFPLAPSSKSTSGGTAALGCLVKDYFPEP | |
| | | VTVSWNSGALTSGVHTFPAVLQSSGLYSLSSVVTVPSSSLGTQTYICNV | |
| | | NHKPSNTKVDKKVEPKSC | |
| Ly1795 | 1^{st} | QVQLVQSGAEVKKPGASVKVSCKASGYTFTSYVMHWVRQKPGQGLEWIG | 261 |
| | chain | YINPYNEGTESTDKFKGRATMTSDKSTSTVYMELSSLRSEDTAVYYCAS | |
| | | IYYGYEGTYFGVWGQGTLVTVSSASTKGPSVFPLAPSSKSTSGGTAALG | |
| | | CLVKDYFPEPVTVSWNSGALTSGVHTFPAVLQSSGLYSLSSVVTVPSSS | |
| | | LGTQTYICNVNHKPSNTKVDKKVEPKSCDKTHTCPPCPAPEAAGPSVFL | |
| | | FPPKPKDTLMISRTPEVTCVVVDVSHEDPEVKFNWYVDGVEVHNAKTKP | |
| | | REEQYNSTYRVVSVLTVLHQDWLNGKEYKCKVSNKALPAPIEKTISKAK | |
| | | GQPREPQVYTLPPSREEMTKNQVSLWCLVKGFYPSDIAVEWESNGQPEN | |
| | | NYKTTPPVLDSDGSFFLYSKLTVDKSRWQQGNVFSCSVMHEALHNHYTQ | |
| | | KSLSLSPGGGGGSGGGGSGGGGSGGGGSQVQLVQSGAEVKKPGASVKVS | |
| | | CKASGYTFAGFEMHWVRQAPGQGLEWMGAIDPKTGGTDYNQKFKDRVTM | |
| | | TRDTSISTAYMELSRLRSDDTAVYYCARDLGYFDVWGQGTLVTVSSGGG | |
| | | GSGGGGSGGGGSGGGGSDIQMTQSPSSLSASVGDRVTITCRASQDIRSN | |
| | | LNWYQQKPGGAVKLLIYYTSRLHSGVPSRFSGSGSGTDYTLTISSLQPE | |
| | | DFATYFCQQSEKLPRTFGGGTKVEIR | |
| | 2^{nd} | QVQLVQSGAEVKKPGASVKVSCKASGYTFTSYVMHWVRQKPGQGLEWIG | 262 |
| | chain | YINPYNEGTESTDKFKGRATMTSDKSTSTVYMELSSLRSEDTAVYYCAS | |
| | | IYYGYEGTYFGVWGQGTLVTVSSASTKGPSVFPLAPSSKSTSGGTAALG | |
| | | CLVKDYFPEPVTVSWNSGALTSGVHTFPAVLQSSGLYSLSSVVTVPSSS | |
| | | LGTQTYICNVNHKPSNTKVDKKVEPKSCGGGGSGGGGSGGGGSGGGGSE | |
| | | VQLVESGGGLVQPGGSLRLSCAASGFTFSTYAMNWVRQAPGKGLEWVGR | |
| | | IRSKYNNYATYYADSVKGRFTISRDDSKNSLYLQMNSLKTEDTAVYYCV | |
| | | RHGNFGNSYVSWFAYWGQGTLVTVSSASVAAPSVFIFPPSDEQLKSGTA | |
| | | SVVCLLNNFYPREAKVQWKVDNALQSGNSQESVTEQDSKDSTYSLSSTL | |
| | | TLSKADYEKHKVYACEVTHQGLSSPVTKSFNRGECDKTHTCPPCPAPEA | |
| | | AGPSVFLFPPKPKDTLMISRTPEVTCVVVDVSHEDPEVKFNWYVDGVEV | |
| | | HNAKTKPREEQYNSTYRVVSVLTVLHQDWLNGKEYKCKVSNKALPAPIE | |
| | | KTISKAKGQPREPQVYTLPPSREEMTKNQVSLSCAVKGFYPSDIAVEWE | |
| | | SNGQPENNYKTTPPVLDSDGSFFLVSKLTVDKSRWQQGNVFSCSVMHEA | |
| | | LHNRFTQKSLSLSPGK | |
| | 3^{rd} | EIVLTQSPATLSLSPGERATLSCRASSSVSYMHWYQQKPGQAPRPWIYA | 263 |
| | chain | TSNLASGIPARFSGSRSGTDYTLTISSLEPEDFAVYYCQQWSSNTLTFG | |
| | | GGTKVEIKRTVAAPSVFIFPPSDEQLKSGTASVVCLLNNFYPREAKVQW | |
| | | KVDNALQSGNSQESVTEQDSKDSTYSLSSTLTLSKADYEKHKVYACEVT | |
| | | HQGLSSPVTKSFNRGEC | |
| | 4^{th} | QAVVTQEPSLTVSPGGTVTLTCRSSTGAVTTSNYANWVQQKPGQAPRGL | 264 |
| | chain | IGGTNKRAPWTPARFSGSLLGGKAALTITGAQAEDEADYYCALWYSNLW | |
| | | VFGGGTKLTVLSSASTKGPSVFPLAPSSKSTSGGTAALGCLVKDYFPEP | |
| | | VTVSWNSGALTSGVHTFPAVLQSSGLYSLSSVVTVPSSSLGTQTYICNV | |
| | | NHKPSNTKVDKKVEPKSC | |
| Lv1796 | 1^{st} | QVQLVQSGAEVKKPGASVKVSCKASGYTFTSYVMHWVRQKPGQGLEWIG | 265 |
| | chain | YINPYNEGTESTDKFKGRATMTSDKSTSTVYMELSSLRSEDTAVYYCAS | |
| | | IYYGYEGTYFGVWGQGTLVTVSSASTKGPSVFPLAPSSKSTSGGTAALG | |
| | | CLVKDYFPEPVTVSWNSGALTSGVHTFPAVLQSSGLYSLSSVVTVPSSS | |
| | | LGTQTYICNVNHKPSNTKVDKKVEPKSCDKTHTCPPCPAPEAAGPSVFL | |
| | | FPPKPKDTLMISRTPEVTCVVVDVSHEDPEVKFNWYVDGVEVHNAKTKP | |
| | | REEQYNSTYRVVSVLTVLHQDWLNGKEYKCKVSNKALPAPIEKTISKAK | |
| | | GQPREPQVYTLPPSREEMTKNQVSLWCLVKGFYPSDIAVEWESNGQPEN | |
| | | NYKTTPPVLDSDGSFFLYSKLTVDKSRWQQGNVFSCSVMHEALHNHYTQ | |
| | | KSLSLSPGGGGGSGGGGSGGGGSGGGGSQVQLVQSGAEVKKPGASVKVS | |
| | | CKASGYTFAGFEMHWVRQAPGQGLEWMGAIDPKTGGTDYNQKFKDRVTM | |
| | | TRDTSISTAYMELSRLRSDDTAVYYCARDLGYFDVWGQGTLVTVSS | |
| | 2^{nd} | QVQLVQSGAEVKKPGASVKVSCKASGYTFTSYVMHWVRQKPGQGLEWIG | 266 |
| | chain | YINPYNEGTESTDKFKGRATMTSDKSTSTVYMELSSLRSEDTAVYYCAS | |
| | | IYYGYEGTYFGVWGQGTLVTVSSASTKGPSVFPLAPSSKSTSGGTAALG | |
| | | CLVKDYFPEPVTVSWNSGALTSGVHTFPAVLQSSGLYSLSSVVTVPSSS | |
| | | LGTQTYICNVNHKPSNTKVDKKVEPKSCGGGGSGGGGSGGGGSGGGGSE | |
| | | VQLVESGGGLVQPGGSLRLSCAASGFTFSTYAMNWVRQAPGKGLEWVGR | |
| | | IRSKYNNYATYYADSVKGRFTISRDDSKNSLYLQMNSLKTEDTAVYYCV | |
| | | RHGNFGNSYVSWFAYWGQGTLVTVSSASVAAPSVFIFPPSDEQLKSGTA | |
| | | SVVCLLNNFYPREAKVQWKVDNALQSGNSQESVTEQDSKDSTYSLSSTL | |
| | | TLSKADYEKHKVYACEVTHQGLSSPVTKSFNRGECDKTHTCPPCPAPEA | |
| | | AGPSVFLFPPKPKDTLMISRTPEVTCVVVDVSHEDPEVKFNWYVDGVEV | |
| | | HNAKTKPREEQYNSTYRVVSVLTVLHQDWLNGKEYKCKVSNKALPAPIE | |
| | | KTISKAKGQPREPQVYTLPPSREEMTKNQVSLSCAVKGFYPSDIAVEWE | |
| | | SNGQPENNYKTTPPVLDSDGSFFLVSKLTVDKSRWQQGNVFSCSVMHEA | |
| | | LHNRFTQKSLSLSPGGGGGSGGGGSGGGGSGGGGSDIQMTQSPSSLSAS | |
| | | VGDRVTITCRASQDIRSNLNWYQQKPGGAVKLLIYYTSRLHSGVPSRFS | |
| | | GSGSGTDYTLTISSLQPEDFATYFCQQSEKLPRTFGGGTKVEIR | |
| | 3^{rd} | EIVLTQSPATLSLSPGERATLSCRASSSVSYMHWYQQKPGQAPRPWIYA | 267 |
| | chain | TSNLASGIPARFSGSRSGTDYTLTISSLEPEDFAVYYCQQWSSNTLTFG | |
| | | GGTKVEIKRTVAAPSVFIFPPSDEQLKSGTASVVCLLNNFYPREAKVQW | |
| | | KVDNALQSGNSQESVTEQDSKDSTYSLSSTLTLSKADYEKHKVYACEVT | |
| | | HQGLSSPVTKSFNRGEC | |
| | 4^{th} | QAVVTQEPSLTVSPGGTVTLTCRSSTGAVTTSNYANWVQQKPGQAPRGL | 268 |
| | chain | IGGTNKRAPWTPARFSGSLLGGKAALTITGAQAEDEADYYCALWYSNLW | |
| | | VFGGGTKLTVLSSASTKGPSVFPLAPSSKSTSGGTAALGCLVKDYFPEP | |
| | | VTVSWNSGALTSGVHTFPAVLQSSGLYSLSSVVTVPSSSLGTQTYICNV | |
| | | NHKPSNTKVDKKVEPKSC | |
| Ly1797 | 1^{st} | QVQLVQSGAEVKKPGASVKVSCKASGYTFTSYVMHWVRQKPGQGLEWIG | 269 |
| | chain | YINPYNEGTESTDKFKGRATMTSDKSTSTVYMELSSLRSEDTAVYYCAS | |
| | | IYYGYEGTYFGVWGQGTLVTVSSASTKGPSVFPLAPSSKSTSGGTAALG | |
| | | CLVKDYFPEPVTVSWNSGALTSGVHTFPAVLQSSGLYSLSSVVTVPSSS | |
| | | LGTQTYICNVNHKPSNTKVDKKVEPKSCDKTHTCPPCPAPEAAGPSVFL | |
| | | FPPKPKDTLMISRTPEVTCVVVDVSHEDPEVKFNWYVDGVEVHNAKTKP | |
| | | REEQYNSTYRVVSVLTVLHQDWLNGKEYKCKVSNKALPAPIEKTISKAK | |
| | | GQPREPQVYTLPPSREEMTKNQVSLWCLVKGFYPSDIAVEWESNGQPEN | |
| | | NYKTTPPVLDSDGSFFLYSKLTVDKSRWQQGNVFSCSVMHEALHNHYTQ | |
| | | KSLSLSPGGGGGSGGGGSGGGGSGGGGSQVQLVQSGAEVKKPGASVKVS | |
| | | CKASGYTFAGFEMHWVRQAPGQGLEWMGAIDPKTGGTDYNQKFKDRVTM | |
| | | TRDTSISTAYMELSRLRSDDTAVYYCARDLGYFDVWGQGTLVTVSSGGG | |
| | | GSGGGGSGGGGSGGGGSDIQMTQSPSSLSASVGDRVTITCRASQDIRSN | |
| | | LNWYQQKPGGAVKLLIYYTSRLHSGVPSRFSGSGSGTDYTLTISSLQPE | |
| | | DFATYFCQQSEKLPRTFGGGTKVEIR | |
| | 2^{nd} | QVQLVQSGAEVKKPGASVKVSCKASGYTFTSYVMHWVRQKPGQGLEWIG | 270 |
| | chain | YINPYNEGTESTDKFKGRATMTSDKSTSTVYMELSSLRSEDTAVYYCAS | |
| | | IYYGYEGTYFGVWGQGTLVTVSSASTKGPSVFPLAPSSKSTSGGTAALG | |
| | | CLVKDYFPEPVTVSWNSGALTSGVHTFPAVLQSSGLYSLSSVVTVPSSS | |
| | | LGTQTYICNVNHKPSNTKVDKKVEPKSCGGGGSGGGGSGGGGSGGGGSQ | |
| | | AVVTQEPSLTVSPGGTVTLTCRSSTGAVTTSNYANWVQQKPGQAPRGLI | |
| | | GGTNKRAPWTPARFSGSLLGGKAALTITGAQAEDEADYYCALWYSNLWV | |
| | | FGGGTKLTVLGGGGSGGGGSGGGGSGGGGSEVQLVESGGGLVQPGGSLR | |
| | | LSCAASGFTFSTYAMNWVRQAPGKGLEWVGRIRSKYNNYATYYADSVKG | |
| | | RFTISRDDSKNSLYLQMNSLKTEDTAVYYCVRHGNFGNSYVSWFAYWGQ | |
| | | GTLVTVSSDKTHTCPPCPAPEAAGPSVFLFPPKPKDTLMISRTPEVTCV | |
| | | VVDVSHEDPEVKFNWYVDGVEVHNAKTKPREEQYNSTYRVVSVLTVLHQ | |
| | | DWLNGKEYKCKVSNKALPAPIEKTISKAKGQPREPQVYTLPPSREEMTK | |
| | | NQVSLSCAVKGFYPSDIAVEWESNGQPENNYKTTPPVLDSDGSFFLVSK | |
| | | LTVDKSRWQQGNVFSCSVMHEALHNRFTQKSLSLSPGK | |
| | 3^{rd} | EIVLTQSPATLSLSPGERATLSCRASSSVSYMHWYQQKPGQAPRPWIYA | 271 |
| | chain | TSNLASGIPARFSGSRSGTDYTLTISSLEPEDFAVYYCQQWSSNTLTFG | |
| | | GGTKVEIKRTVAAPSVFIFPPSDEQLKSGTASVVCLLNNFYPREAKVQW | |
| | | KVDNALQSGNSQESVTEQDSKDSTYSLSSTLTLSKADYEKHKVYACEVT | |
| | | HQGLSSPVTKSFNRGEC | |
| Ly1798 | ^{1st} | QVQLVQSGAEVKKPGASVKVSCKASGYTFTSYVMHWVRQKPGQGLEWIG | 272 |
| | chain | YINPYNEGTESTDKFKGRATMTSDKSTSTVYMELSSLRSEDTAVYYCAS | |
| | | IYYGYEGTYFGVWGQGTLVTVSSASTKGPSVFPLAPSSKSTSGGTAALG | |
| | | CLVKDYFPEPVTVSWNSGALTSGVHTFPAVLQSSGLYSLSSVVTVPSSS | |
| | | LGTQTYICNVNHKPSNTKVDKKVEPKSCDKTHTCPPCPAPEAAGPSVEL | |
| | | FPPKPKDTLMISRTPEVTCVVVDVSHEDPEVKFNWYVDGVEVHNAKTKP | |
| | | REEQYNSTYRVVSVLTVLHQDWLNGKEYKCKVSNKALPAPIEKTISKAK | |
| | | GQPREPQVYTLPPSREEMTKNQVSLWCLVKGFYPSDIAVEWESNGQPEN | |
| | | NYKTTPPVLDSDGSFFLYSKLTVDKSRWQQGNVFSCSVMHEALHNHYTQ | |
| | | KSLSLSPGGGGGSGGGGSGGGGSGGGGSQVQLVQSGAEVKKPGASVKVS | |
| | | CKASGYTFAGFEMHWVRQAPGQGLEWMGAIDPKTGGTDYNQKFKDRVTM | |
| | | TRDTSISTAYMELSRLRSDDTAVYYCARDLGYFDVWGQGTLVTVSSGGG | |
| | | GSGGGGSGGGGSGGGGSDIQMTQSPSSLSASVGDRVTITCRASQDIRSN | |
| | | LNWYQQKPGGAVKLLIYYTSRLHSGVPSRFSGSGSGTDYTLTISSLQPE | |
| | | DFATYFCQQSEKLPRTFGGGTKVEIR | |
| | 2^{nd} | QVQLVQSGAEVKKPGASVKVSCKASGYTFTSYVMHWVRQKPGQGLEWIG | 273 |
| | chain | YINPYNEGTESTDKFKGRATMTSDKSTSTVYMELSSLRSEDTAVYYCAS | |
| | | IYYGYEGTYFGVWGQGTLVTVSSASTKGPSVFPLAPSSKSTSGGTAALG | |
| | | CLVKDYFPEPVTVSWNSGALTSGVHTFPAVLQSSGLYSLSSVVTVPSSS | |
| | | LGTQTYICNVNHKPSNTKVDKKVEPKSCGGGGSGGGGSGGGGSGGGGSQ | |
| | | AVVTQEPSLTVSPGGTVTLTCRSSTGAVTTSNYANWVQQKPGQAPRGLI | |
| | | GGTNKRAPWTPARFSGSLLGGKAALTITGAQAEDEADYYCALWYSNLWV | |
| | | FGGGTKLTVLGGGGSGGGGSGGGGSGGGGSEVQLVESGGGLVQPGGSLR | |
| | | LSCAASGFTFSTYAMNWVRQAPGKGLEWVGRIRSKYNNYATYYADSVKG | |
| | | RFTISRDDSKNSLYLQMNSLKTEDTAVYYCVRHGNFGNSYVSWFAYWGQ | |
| | | GTLVTVSSDKTHTCPPCPAPEAAGPSVFLFPPKPKDTLMISRTPEVTCV | |
| | | VVDVSHEDPEVKFNWYVDGVEVHNAKTKPREEQYNSTYRVVSVLTVLHQ | |
| | | DWLNGKEYKCKVSNKALPAPIEKTISKAKGQPREPQVYTLPPSREEMTK | |
| | | NQVSLSCAVKGFYPSDIAVEWESNGQPENNYKTTPPVLDSDGSFFLVSK | |
| | | LTVDKSRWQQGNVFSCSVMHEALHNRFTQKSLSLSPGGGGGSGGGGSGG | |
| | | GGSGGGGSQVQLVQSGAEVKKPGASVKVSCKASGYTFAGFEMHWVRQAP | |
| | | GQGLEWMGAIDPKTGGTDYNQKFKDRVTMTRDTSISTAYMELSRLRSDD | |
| | | TAVYYCARDLGYFDVWGQGTLVTVSSGGGGSGGGGSGGGGSGGGGSDIQ | |
| | | MTQSPSSLSASVGDRVTITCRASQDIRSNLNWYQQKPGGAVKLLIYYTS | |
| | | RLHSGVPSRFSGSGSGTDYTLTISSLQPEDFATYFCQQSEKLPRTFGGG | |
| | | TKVEIR | |
| | 3^{rd} | EIVLTQSPATLSLSPGERATLSCRASSSVSYMHWYQQKPGQAPRPWIYA | 274 |
| | chain | TSNLASGIPARFSGSRSGTDYTLTISSLEPEDFAVYYCQQWSSNTLTFG | |
| | | GGTKVEIKRTVAAPSVFIFPPSDEQLKSGTASVVCLLNNFYPREAKVQW | |
| | | KVDNALQSGNSQESVTEQDSKDSTYSLSSTLTLSKADYEKHKVYACEVT | |
| | | HQGLSSPVTKSFNRGEC | |
| Lv1799 | 1^{st} | QVQLVQSGAEVKKPGASVKVSCKASGYTFTSYVMHWVRQKPGQGLEWIG | 275 |
| | chain | YINPYNEGTESTDKFKGRATMTSDKSTSTVYMELSSLRSEDTAVYYCAS | |
| | | IYYGYEGTYFGVWGQGTLVTVSSASTKGPSVFPLAPSSKSTSGGTAALG | |
| | | CLVKDYFPEPVTVSWNSGALTSGVHTFPAVLQSSGLYSLSSVVTVPSSS | |
| | | LGTQTYICNVNHKPSNTKVDKKVEPKSCDKTHTCPPCPAPEAAGPSVFL | |
| | | FPPKPKDTLMISRTPEVTCVVVDVSHEDPEVKFNWYVDGVEVHNAKTKP | |
| | | REEQYNSTYRVVSVLTVLHQDWLNGKEYKCKVSNKALPAPIEKTISKAK | |
| | | GQPREPQVYTLPPSREEMTKNQVSLWCLVKGFYPSDIAVEWESNGQPEN | |
| | | NYKTTPPVLDSDGSFFLYSKLTVDKSRWQQGNVFSCSVMHEALHNHYTQ | |
| | | KSLSLSPGK | |
| | 2^{nd} | QVQLVQSGAEVKKPGASVKVSCKASGYTFTSYVMHWVRQKPGQGLEWIG | 276 |
| | chain | YINPYNEGTESTDKFKGRATMTSDKSTSTVYMELSSLRSEDTAVYYCAS | |
| | | IYYGYEGTYFGVWGQGTLVTVSSASTKGPSVFPLAPSSKSTSGGTAALG | |
| | | CLVKDYFPEPVTVSWNSGALTSGVHTFPAVLQSSGLYSLSSVVTVPSSS | |
| | | LGTQTYICNVNHKPSNTKVDKKVEPKSCGGGGSGGGGSGGGGSGGGGSQ | |
| | | AVVTQEPSLTVSPGGTVTLTCRSSTGAVTTSNYANWVQQKPGQAPRGLI | |
| | | GGTNKRAPWTPARFSGSLLGGKAALTITGAQAEDEADYYCALWYSNLWV | |
| | | FGGGTKLTVLGGGGSGGGGSGGGGSGGGGSEVQLVESGGGLVQPGGSLR | |
| | | LSCAASGFTFSTYAMNWVRQAPGKGLEWVGRIRSKYNNYATYYADSVKG | |
| | | RFTISRDDSKNSLYLQMNSLKTEDTAVYYCVRHGNFGNSYVSWFAYWGQ | |
| | | GTLVTVSSDKTHTCPPCPAPEAAGPSVFLFPPKPKDTLMISRTPEVTCV | |
| | | VVDVSHEDPEVKFNWYVDGVEVHNAKTKPREEQYNSTYRVVSVLTVLHQ | |
| | | DWLNGKEYKCKVSNKALPAPIEKTISKAKGQPREPQVYTLPPSREEMTK | |
| | | NQVSLSCAVKGFYPSDIAVEWESNGQPENNYKTTPPVLDSDGSFFLVSK | |
| | | LTVDKSRWQQGNVFSCSVMHEALHNRFTQKSLSLSPGGGGGSGGGGSGG | |
| | | GGSGGGGSQVQLVQSGAEVKKPGASVKVSCKASGYTFAGFEMHWVRQAP | |
| | | GQGLEWMGAIDPKTGGTDYNQKFKDRVTMTRDTSISTAYMELSRLRSDD | |
| | | TAVYYCARDLGYFDVWGQGTLVTVSSGGGGSGGGGSGGGGSGGGGSDIQ | |
| | | MTQSPSSLSASVGDRVTITCRASQDIRSNLNWYQQKPGGAVKLLIYYTS | |
| | | RLHSGVPSRFSGSGSGTDYTLTISSLQPEDFATYFCQQSEKLPRTFGGG | |
| | | TKVEIR | |
| | 3^{rd} | EIVLTQSPATLSLSPGERATLSCRASSSVSYMHWYQQKPGQAPRPWIYA | 277 |
| | chain | TSNLASGIPARFSGSRSGTDYTLTISSLEPEDFAVYYCQQWSSNTLTFG | |
| | | GGTKVEIKRTVAAPSVFIFPPSDEQLKSGTASVVCLLNNFYPREAKVQW | |
| | | KVDNALQSGNSQESVTEQDSKDSTYSLSSTLTLSKADYEKHKVYACEVT | |
| | | HQGLSSPVTKSFNRGEC | |
| Ly1800 | 1^{st} | QVQLVQSGAEVKKPGASVKVSCKASGYTFTSYVMHWVRQKPGQGLEWIG | 278 |
| | chain | YINPYNEGTESTDKFKGRATMTSDKSTSTVYMELSSLRSEDTAVYYCAS | |
| | | IYYGYEGTYFGVWGQGTLVTVSSASTKGPSVFPLAPSSKSTSGGTAALG | |
| | | CLVKDYFPEPVTVSWNSGALTSGVHTFPAVLQSSGLYSLSSVVTVPSSS | |
| | | LGTQTYICNVNHKPSNTKVDKKVEPKSCGGGGSGGGGSGGGGSGGGGSE | |
| | | VQLVESGGGLVQPGGSLRLSCAASGFTFSTYAMNWVRQAPGKGLEWVGR | |
| | | IRSKYNNYATYYADSVKGRFTISRDDSKNSLYLQMNSLKTEDTAVYYCV | |
| | | RHGNFGNSYVSWFAYWGQGTLVTVSSPAPEAAGPSVFLFPPKPKDTLMI | |
| | | SRTPEVTCVVVDVSHEDPEVKFNWYVDGVEVHNAKTKPREEQYNSTYRV | |
| | | VSVLTVLHQDWLNGKEYKCKVSNKALPAPIEKTISKAKGQPREPQVYTL | |
| | | PPSREEMTKNQVSLWCLVKGFYPSDIAVEWESNGQPENNYKTTPPVLDS | |
| | | DGSFFLYSKLTVDKSRWQQGNVFSCSVMHEALHNHYTQKSLSLSPGGGG | |
| | | GSGGGGSGGGGSGGGGSQVQLVQSGAEVKKPGASVKVSCKASGYTFAGF | |
| | | EMHWVRQAPGQGLEWMGAIDPKTGGTDYNQKFKDRVTMTRDTSISTAYM | |
| | | ELSRLRSDDTAVYYCARDLGYFDVWGQGTLVTVSSGGGGSGGGGSGGGG | |
| | | SGGGGSDIQMTQSPSSLSASVGDRVTITCRASQDIRSNLNWYQQKPGGA | |
| | | VKLLIYYTSRLHSGVPSRFSGSGSGTDYTLTISSLQPEDFATYFCQQSE | |
| | | KLPRTFGGGTKVEIR | |
| | 2^{nd} | QVQLVQSGAEVKKPGASVKVSCKASGYTFTSYVMHWVRQKPGQGLEWIG | 279 |
| | chain | YINPYNEGTESTDKFKGRATMTSDKSTSTVYMELSSLRSEDTAVYYCAS | |
| | | IYYGYEGTYFGVWGQGTLVTVSSASTKGPSVFPLAPSSKSTSGGTAALG | |
| | | CLVKDYFPEPVTVSWNSGALTSGVHTFPAVLQSSGLYSLSSVVTVPSSS | |
| | | LGTQTYICNVNHKPSNTKVDKKVEPKSCGGGGSGGGGSGGGGSGGGGSQ | |
| | | AVVTQEPSLTVSPGGTVTLTCRSSTGAVTTSNYANWVQQKPGQAPRGLI | |
| | | GGTNKRAPWTPARFSGSLLGGKAALTITGAQAEDEADYYCALWYSNLWV | |
| | | FGGGTKLTVLPAPEAAGPSVFLFPPKPKDTLMISRTPEVTCVVVDVSHE | |
| | | DPEVKFNWYVDGVEVHNAKTKPREEQYNSTYRVVSVLTVLHQDWLNGKE | |
| | | YKCKVSNKALPAPIEKTISKAKGQPREPQVYTLPPSREEMTKNQVSLSC | |
| | | AVKGFYPSDIAVEWESNGQPENNYKTTPPVLDSDGSFFLVSKLTVDKSR | |
| | | WQQGNVFSCSVMHEALHNRFTQKSLSLSPGGGGGSGGGGSGGGGSGGGG | |
| | | SQVQLVQSGAEVKKPGASVKVSCKASGYTFAGFEMHWVRQAPGQGLEWM | |
| | | GAIDPKTGGTDYNQKFKDRVTMTRDTSISTAYMELSRLRSDDTAVYYCA | |
| | | RDLGYFDVWGQGTLVTVSSGGGGSGGGGSGGGGSGGGGSDIQMTQSPSS | |
| | | LSASVGDRVTITCRASQDIRSNLNWYQQKPGGAVKLLIYYTSRLHSGVP | |
| | | SRFSGSGSGTDYTLTISSLQPEDFATYFCQQSEKLPRTFGGGTKVEIR | |
| | 3^{rd} | EIVLTQSPATLSLSPGERATLSCRASSSVSYMHWYQQKPGQAPRPWIYA | 280 |
| | chain | TSNLASGIPARFSGSRSGTDYTLTISSLEPEDFAVYYCQQWSSNTLTFG | |
| | | GGTKVEIKRTVAAPSVFIFPPSDEQLKSGTASVVCLLNNFYPREAKVQW | |
| | | KVDNALQSGNSQESVTEQDSKDSTYSLSSTLTLSKADYEKHKVYACEVT | |
| | | HQGLSSPVTKSFNRGEC | |
| Ly1801 | 1^{st} | QVQLVQSGAEVKKPGASVKVSCKASGYTFTSYVMHWVRQKPGQGLEWIG | 281 |
| | chain | YINPYNEGTESTDKFKGRATMTSDKSTSTVYMELSSLRSEDTAVYYCAS | |
| | | IYYGYEGTYFGVWGQGTLVTVSSASTKGPSVFPLAPSSKSTSGGTAALG | |
| | | CLVKDYFPEPVTVSWNSGALTSGVHTFPAVLQSSGLYSLSSVVTVPSSS | |
| | | LGTQTYICNVNHKPSNTKVDKKVEPKSCGGGGSGGGGSGGGGSGGGGSE | |
| | | VQLVESGGGLVQPGGSLRLSCAASGFTFSTYAMNWVRQAPGKGLEWVGR | |
| | | IRSKYNNYATYYADSVKGRFTISRDDSKNSLYLQMNSLKTEDTAVYYCV | |
| | | RHGNFGNSYVSWFAYWGQGTLVTVSSPAPEAAGPSVFLFPPKPKDTLMI | |
| | | SRTPEVTCVVVDVSHEDPEVKFNWYVDGVEVHNAKTKPREEQYNSTYRV | |
| | | VSVLTVLHQDWLNGKEYKCKVSNKALPAPIEKTISKAKGQPREPQVYTL | |
| | | PPSREEMTKNQVSLWCLVKGFYPSDIAVEWESNGQPENNYKTTPPVLDS | |
| | | DGSFFLYSKLTVDKSRWQQGNVFSCSVMHEALHNHYTQKSLSLSPGGGG | |
| | | GSGGGGSGGGGSGGGGSQVQLVQSGAEVKKPGASVKVSCKASGYTFAGF | |
| | | EMHWVRQAPGQGLEWMGAIDPKTGGTDYNQKFKDRVTMTRDTSISTAYM | |
| | | ELSRLRSDDTAVYYCARDLGYFDVWGQGTLVTVSSGGGGSGGGGSGGGG | |
| | | SGGGGSDIQMTQSPSSLSASVGDRVTITCRASQDIRSNLNWYQQKPGGA | |
| | | VKLLIYYTSRLHSGVPSRFSGSGSGTDYTLTISSLQPEDFATYFCQQSE | |
| | | KLPRTFGGGTKVEIR | |
| | 2^{nd} | QVQLVQSGAEVKKPGASVKVSCKASGYTFTSYVMHWVRQKPGQGLEWIG | 282 |
| | chain | YINPYNEGTESTDKFKGRATMTSDKSTSTVYMELSSLRSEDTAVYYCAS | |
| | | IYYGYEGTYFGVWGQGTLVTVSSASTKGPSVFPLAPSSKSTSGGTAALG | |
| | | CLVKDYFPEPVTVSWNSGALTSGVHTFPAVLQSSGLYSLSSVVTVPSSS | |
| | | LGTQTYICNVNHKPSNTKVDKKVEPKSCGGGGSGGGGSGGGGSGGGGSQ | |
| | | AVVTQEPSLTVSPGGTVTLTCRSSTGAVTTSNYANWVQQKPGQAPRGLI | |
| | | GGTNKRAPWTPARFSGSLLGGKAALTITGAQAEDEADYYCALWYSNLWV | |
| | | FGGGTKLTVLPAPEAAGPSVFLFPPKPKDTLMISRTPEVTCVVVDVSHE | |
| | | DPEVKFNWYVDGVEVHNAKTKPREEQYNSTYRVVSVLTVLHQDWLNGKE | |
| | | YKCKVSNKALPAPIEKTISKAKGQPREPQVYTLPPSREEMTKNQVSLSC | |
| | | AVKGFYPSDIAVEWESNGQPENNYKTTPPVLDSDGSFFLVSKLTVDKSR | |
| | | WQQGNVFSCSVMHEALHNRFTQKSLSLSPGK | |
| | 3^{rd} | EIVLTQSPATLSLSPGERATLSCRASSSVSYMHWYQQKPGQAPRPWIYA | 283 |
| | chain | TSNLASGIPARFSGSRSGTDYTLTISSLEPEDFAVYYCQQWSSNTLTFG | |
| | | GGTKVEIKRTVAAPSVFIFPPSDEQLKSGTASVVCLLNNFYPREAKVQW | |
| | | KVDNALQSGNSQESVTEQDSKDSTYSLSSTLTLSKADYEKHKVYACEVT | |
| | | HQGLSSPVTKSFNRGEC | |
| Ly1802 | 1^{st} | QVQLVQSGAEVKKPGASVKVSCKASGYTFTSYVMHWVRQKPGQGLEWIG | 284 |
| | chain | YINPYNEGTESTDKFKGRATMTSDKSTSTVYMELSSLRSEDTAVYYCAS | |
| | | IYYGYEGTYFGVWGQGTLVTVSSASTKGPSVFPLAPSSKSTSGGTAALG | |
| | | CLVKDYFPEPVTVSWNSGALTSGVHTFPAVLQSSGLYSLSSVVTVPSSS | |
| | | LGTQTYICNVNHKPSNTKVDKKVEPKSCGGGGSGGGGSGGGGSGGGGSE | |
| | | VQLVESGGGLVQPGGSLRLSCAASGFTFSTYAMNWVRQAPGKGLEWVGR | |
| | | IRSKYNNYATYYADSVKGRFTISRDDSKNSLYLQMNSLKTEDTAVYYCV | |
| | | RHGNFGNSYVSWFAYWGQGTLVTVSSPAPEAAGPSVFLFPPKPKDTLMI | |
| | | SRTPEVTCVVVDVSHEDPEVKFNWYVDGVEVHNAKTKPREEQYNSTYRV | |
| | | VSVLTVLHQDWLNGKEYKCKVSNKALPAPIEKTISKAKGQPREPQVYTL | |
| | | PPSREEMTKNQVSLWCLVKGFYPSDIAVEWESNGQPENNYKTTPPVLDS | |
| | | DGSFFLYSKLTVDKSRWQQGNVFSCSVMHEALHNHYTQKSLSLSPGK | |
| | 2^{nd} | QVQLVQSGAEVKKPGASVKVSCKASGYTFTSYVMHWVRQKPGQGLEWIG | 285 |
| | chain | YINPYNEGTESTDKFKGRATMTSDKSTSTVYMELSSLRSEDTAVYYCAS | |
| | | IYYGYEGTYFGVWGQGTLVTVSSASTKGPSVFPLAPSSKSTSGGTAALG | |
| | | CLVKDYFPEPVTVSWNSGALTSGVHTFPAVLQSSGLYSLSSVVTVPSSS | |
| | | LGTQTYICNVNHKPSNTKVDKKVEPKSCGGGGSGGGGSGGGGSGGGGSQ | |
| | | AVVTQEPSLTVSPGGTVTLTCRSSTGAVTTSNYANWVQQKPGQAPRGLI | |
| | | GGTNKRAPWTPARFSGSLLGGKAALTITGAQAEDEADYYCALWYSNLWV | |
| | | FGGGTKLTVLPAPEAAGPSVFLFPPKPKDTLMISRTPEVTCVVVDVSHE | |
| | | DPEVKFNWYVDGVEVHNAKTKPREEQYNSTYRVVSVLTVLHQDWLNGKE | |
| | | YKCKVSNKALPAPIEKTISKAKGQPREPQVYTLPPSREEMTKNQVSLSC | |
| | | AVKGFYPSDIAVEWESNGQPENNYKTTPPVLDSDGSFFLVSKLTVDKSR | |
| | | WQQGNVFSCSVMHEALHNRFTQKSLSLSPGGGGGSGGGGSGGGGSGGGG | |
| | | SQVQLVQSGAEVKKPGASVKVSCKASGYTFAGFEMHWVRQAPGQGLEWM | |
| | | GAIDPKTGGTDYNQKFKDRVTMTRDTSISTAYMELSRLRSDDTAVYYCA | |
| | | RDLGYFDVWGQGTLVTVSSGGGGSGGGGSGGGGSGGGGSDIQMTQSPSS | |
| | | LSASVGDRVTITCRASQDIRSNLNWYQQKPGGAVKLLIYYTSRLHSGVP | |
| | | SRFSGSGSGTDYTLTISSLQPEDFATYFCQQSEKLPRTFGGGTKVEIR | |
| | 3^{rd} | EIVLTQSPATLSLSPGERATLSCRASSSVSYMHWYQQKPGQAPRPWIYA | 286 |
| | chain | TSNLASGIPARFSGSRSGTDYTLTISSLEPEDFAVYYCQQWSSNTLTFG | |
| | | GGTKVEIKRTVAAPSVFIFPPSDEQLKSGTASVVCLLNNFYPREAKVQW | |
| | | KVDNALQSGNSQESVTEQDSKDSTYSLSSTLTLSKADYEKHKVYACEVT | |
| | | HQGLSSPVTKSFNRGEC | |
| Ly1803 | 1^{st} | QVQLVQSGAEVKKPGASVKVSCKASGYTFTSYVMHWVRQKPGQGLEWIG | 287 |
| | chain | YINPYNEGTESTDKFKGRATMTSDKSTSTVYMELSSLRSEDTAVYYCAS | |
| | | IYYGYEGTYFGVWGQGTLVTVSSASTKGPSVFPLAPSSKSTSGGTAALG | |
| | | CLVKDYFPEPVTVSWNSGALTSGVHTFPAVLQSSGLYSLSSVVTVPSSS | |
| | | LGTQTYICNVNHKPSNTKVDKKVEPKSCGGGGSGGGGSGGGGSGGGGSE | |
| | | VQLVESGGGLVQPGGSLRLSCAASGFTFSTYAMNWVRQAPGKGLEWVGR | |
| | | IRSKYNNYATYYADSVKGRFTISRDDSKNSLYLQMNSLKTEDTAVYYCV | |
| | | RHGNFGNSYVSWFAYWGQGTLVTVSSPAPEAAGPSVFLFPPKPKDTLMI | |
| | | SRTPEVTCVVVDVSHEDPEVKFNWYVDGVEVHNAKTKPREEQYNSTYRV | |
| | | VSVLTVLHQDWLNGKEYKCKVSNKALPAPIEKTISKAKGQPREPQVYTL | |
| | | PPSREEMTKNQVSLWCLVKGFYPSDIAVEWESNGQPENNYKTTPPVLDS | |
| | | DGSFFLYSKLTVDKSRWQQGNVFSCSVMHEALHNHYTQKSLSLSPGGGG | |
| | | GSGGGGSGGGGSGGGGSQVQLVQSGAEVKKPGASVKVSCKASGYTFAGF | |
| | | EMHWVRQAPGQGLEWMGAIDPKTGGTDYNQKFKDRVTMTRDTSISTAYM | |
| | | ELSRLRSDDTAVYYCARDLGYFDVWGQGTLVTVSS | |
| | 2^{nd} | QVQLVQSGAEVKKPGASVKVSCKASGYTFTSYVMHWVRQKPGQGLEWIG | 288 |
| | chain | YINPYNEGTESTDKFKGRATMTSDKSTSTVYMELSSLRSEDTAVYYCAS | |
| | | IYYGYEGTYFGVWGQGTLVTVSSASTKGPSVFPLAPSSKSTSGGTAALG | |
| | | CLVKDYFPEPVTVSWNSGALTSGVHTFPAVLQSSGLYSLSSVVTVPSSS | |
| | | LGTQTYICNVNHKPSNTKVDKKVEPKSCGGGGSGGGGSGGGGSGGGGSQ | |
| | | AVVTQEPSLTVSPGGTVTLTCRSSTGAVTTSNYANWVQQKPGQAPRGLI | |
| | | GGTNKRAPWTPARFSGSLLGGKAALTITGAQAEDEADYYCALWYSNLWV | |
| | | FGGGTKLTVLPAPEAAGPSVFLFPPKPKDTLMISRTPEVTCVVVDVSHE | |
| | | DPEVKFNWYVDGVEVHNAKTKPREEQYNSTYRVVSVLTVLHQDWLNGKE | |
| | | YKCKVSNKALPAPIEKTISKAKGQPREPQVYTLPPSREEMTKNQVSLSC | |
| | | AVKGFYPSDIAVEWESNGQPENNYKTTPPVLDSDGSFFLVSKLTVDKSR | |
| | | WQQGNVFSCSVMHEALHNRFTQKSLSLSPGGGGGSGGGGSGGGGSGGGG | |
| | | SDIQMTQSPSSLSASVGDRVTITCRASQDIRSNLNWYQQKPGGAVKLLI | |
| | | YYTSRLHSGVPSRFSGSGSGTDYTLTISSLQPEDFATYFCQQSEKLPRT | |
| | | FGGGTKVEIR | |
| | 3^{rd} | EIVLTQSPATLSLSPGERATLSCRASSSVSYMHWYQQKPGQAPRPWIYA | 289 |
| | chain | TSNLASGIPARFSGSRSGTDYTLTISSLEPEDFAVYYCQQWSSNTLTFG | |
| | | GGTKVEIKRTVAAPSVFIFPPSDEQLKSGTASVVCLLNNFYPREAKVQW | |
| | | KVDNALQSGNSQESVTEQDSKDSTYSLSSTLTLSKADYEKHKVYACEVT | |
| | | HQGLSSPVTKSFNRGEC | |
| Ly1804 | 1^{st} | QVQLVQSGAEVKKPGASVKVSCKASGYTFTSYVMHWVRQKPGQGLEWIG | 290 |
| | chain | YINPYNEGTESTDKFKGRATMTSDKSTSTVYMELSSLRSEDTAVYYCAS | |
| | | IYYGYEGTYFGVWGQGTLVTVSSASTKGPSVFPLAPSSKSTSGGTAALG | |
| | | CLVKDYFPEPVTVSWNSGALTSGVHTFPAVLQSSGLYSLSSVVTVPSSS | |
| | | LGTQTYICNVNHKPSNTKVDKKVEPKSCGGGGSGGGGSGGGGSGGGGSE | |
| | | VQLVESGGGLVQPGGSLRLSCAASGFTFSTYAMNWVRQAPGKGLEWVGR | |
| | | IRSKYNNYATYYADSVKGRFTISRDDSKNSLYLQMNSLKTEDTAVYYCV | |
| | | RHGNFGNSYVSWFAYWGQGTLVTVSSPAPEAAGPSVFLFPPKPKDTLMI | |
| | | SRTPEVTCVVVDVSHEDPEVKFNWYVDGVEVHNAKTKPREEQYNSTYRV | |
| | | VSVLTVLHQDWLNGKEYKCKVSNKALPAPIEKTISKAKGQPREPQVYTL | |
| | | PPSREEMTKNQVSLWCLVKGFYPSDIAVEWESNGQPENNYKTTPPVLDS | |
| | | DGSFFLYSKLTVDKSRWQQGNVFSCSVMHEALHNHYTQKSLSLSPGK | |
| | 2^{nd} | QVQLVQSGAEVKKPGASVKVSCKASGYTFTSYVMHWVRQKPGQGLEWIG | 291 |
| | chain | YINPYNEGTESTDKFKGRATMTSDKSTSTVYMELSSLRSEDTAVYYCAS | |
| | | IYYGYEGTYFGVWGQGTLVTVSSASTKGPSVFPLAPSSKSTSGGTAALG | |
| | | CLVKDYFPEPVTVSWNSGALTSGVHTFPAVLQSSGLYSLSSVVTVPSSS | |
| | | LGTQTYICNVNHKPSNTKVDKKVEPKSCGGGGSGGGGSGGGGSGGGGSQ | |
| | | AVVTQEPSLTVSPGGTVTLTCRSSTGAVTTSNYANWVQQKPGQAPRGLI | |
| | | GGTNKRAPWTPARFSGSLLGGKAALTITGAQAEDEADYYCALWYSNLWV | |
| | | FGGGTKLTVLPAPEAAGPSVFLFPPKPKDTLMISRTPEVTCVVVDVSHE | |
| | | DPEVKFNWYVDGVEVHNAKTKPREEQYNSTYRVVSVLTVLHQDWLNGKE | |
| | | YKCKVSNKALPAPIEKTISKAKGQPREPQVYTLPPSREEMTKNQVSLSC | |
| | | AVKGFYPSDIAVEWESNGQPENNYKTTPPVLDSDGSFFLVSKLTVDKSR | |
| | | WQQGNVFSCSVMHEALHNRFTQKSLSLSPGK | |
| | 3^{rd} | EIVLTQSPATLSLSPGERATLSCRASSSVSYMHWYQQKPGQAPRPWIYA | 292 |
| | chain | TSNLASGIPARFSGSRSGTDYTLTISSLEPEDFAVYYCQQWSSNTLTFG | |
| | | GGTKVEIKRTVAAPSVFIFPPSDEQLKSGTASVVCLLNNFYPREAKVQW | |
| | | KVDNALQSGNSQESVTEQDSKDSTYSLSSTLTLSKADYEKHKVYACEVT | |
| | | HQGLSSPVTKSFNRGECGGGGSGGGGSGGGGSGGGGSQVQLVQSGAEVK | |
| | | KPGASVKVSCKASGYTFAGFEMHWVRQAPGQGLEWMGAIDPKTGGTDYN | |
| | | QKFKDRVTMTRDTSISTAYMELSRLRSDDTAVYYCARDLGYFDVWGQGT | |
| | | LVTVSSGGGGSGGGGSGGGGSGGGGSDIQMTQSPSSLSASVGDRVTITC | |
| | | RASQDIRSNLNWYQQKPGGAVKLLIYYTSRLHSGVPSRFSGSGSGTDYT | |
| | | LTISSLQPEDFATYFCQQSEKLPRTFGGGTKVEIR | |
| Ly1805 | 1^{st} | QVQLVQSGAEVKKPGASVKVSCKASGYTFTSYVMHWVRQKPGQGLEWIG | 293 |
| | chain | YINPYNEGTESTDKFKGRATMTSDKSTSTVYMELSSLRSEDTAVYYCAS | |
| | | IYYGYEGTYFGVWGQGTLVTVSSASTKGPSVFPLAPSSKSTSGGTAALG | |
| | | CLVKDYFPEPVTVSWNSGALTSGVHTFPAVLQSSGLYSLSSVVTVPSSS | |
| | | LGTQTYICNVNHKPSNTKVDKKVEPKSCDKTHTCPPCPAPEAAGPSVFL | |
| | | FPPKPKDTLMISRTPEVTCVVVDVSHEDPEVKFNWYVDGVEVHNAKTKP | |
| | | REEQYNSTYRVVSVLTVLHQDWLNGKEYKCKVSNKALPAPIEKTISKAK | |
| | | GQPREPQVYTLPPSREEMTKNQVSLWCLVKGFYPSDIAVEWESNGQPEN | |
| | | NYKTTPPVLDSDGSFFLYSKLTVDKSRWQQGNVFSCSVMHEALHNHYTQ | |
| | | KSLSLSPGGGGGSGGGGSGGGGSGGGGSQVQLVQSGAEVKKPGASVKVS | |
| | | CKASGYTFAGFEMHWVRQAPGQGLEWMGAIDPKTGGTDYNQKFKDRVTM | |
| | | TRDTSISTAYMELSRLRSDDTAVYYCARDLGYFDVWGQGTLVTVSSGGG | |
| | | GSGGGGSGGGGSGGGGSDIQMTQSPSSLSASVGDRVTITCRASQDIRSN | |
| | | LNWYQQKPGGAVKLLIYYTSRLHSGVPSRFSGSGSGTDYTLTISSLQPE | |
| | | DFATYFCQQSEKLPRTFGGGTKVEIR | |
| | 2^{nd} | QVQLVQSGAEVKKPGASVKVSCKASGYTFTSYVMHWVRQKPGQGLEWIG | 294 |
| | chain | YINPYNEGTESTDKFKGRATMTSDKSTSTVYMELSSLRSEDTAVYYCAS | |
| | | IYYGYEGTYFGVWGQGTLVTVSSASTKGPSVFPLAPSSKSTSGGTAALG | |
| | | CLVKDYFPEPVTVSWNSGALTSGVHTFPAVLQSSGLYSLSSVVTVPSSS | |
| | | LGTQTYICNVNHKPSNTKVDKKVEPKSCDKTHTCPPCPAPEAAGPSVFL | |
| | | FPPKPKDTLMISRTPEVTCVVVDVSHEDPEVKFNWYVDGVEVHNAKTKP | |
| | | REEQYNSTYRVVSVLTVLHQDWLNGKEYKCKVSNKALPAPIEKTISKAK | |
| | | GQPREPQVYTLPPSREEMTKNQVSLSCAVKGFYPSDIAVEWESNGQPEN | |
| | | NYKTTPPVLDSDGSFFLVSKLTVDKSRWQQGNVFSCSVMHEALHNRFTQ | |
| | | KSLSLSPGGGGGSGGGGSGGGGSGGGGSDIQMTQSPSTLSASVGDRVTI | |
| | | TCSASSSVSYMNWYQQKPGKAPKLLIYDTSKLASGVPSRFSGSGSGTEF | |
| | | TLTISSLQPDDFATYYCQQWSSNPFTFGQGTKLEIKGGGGSGGGGSGGG | |
| | | GSGGGGSQVQLVQSGAEVKKPGASVKVSCKASGYTFTRYTMHWVRQAPG | |
| | | QGLEWMGYINPSRGYTNYNQKFKDRVTMTRDTSTSTVYMELSSLRSEDT | |
| | | AVYYCARYYDDHYCLDYWGQGTLVTVSS | |
| | 3^{rd} | EIVLTQSPATLSLSPGERATLSCRASSSVSYMHWYQQKPGQAPRPWIYA | 295 |
| | chain | TSNLASGIPARFSGSRSGTDYTLTISSLEPEDFAVYYCQQWSSNTLTFG | |
| | | GGTKVEIKRTVAAPSVFIFPPSDEQLKSGTASVVCLLNNFYPREAKVQW | |
| | | KVDNALQSGNSQESVTEQDSKDSTYSLSSTLTLSKADYEKHKVYACEVT | |
| | | HQGLSSPVTKSFNRGEC | |
| Ly1849 | 1^{st} | QVQLVQSGAEVKKPGASVKVSCKASGYTFTSYVMHWVRQKPGQGLEWIG | 296 |
| | chain | YINPYNEGTESTDKFKGRATMTSDKSTSTVYMELSSLRSEDTAVYYCAS | |
| | | IYYGYEGTYFGVWGQGTLVTVSSASTKGPSVFPLAPSSKSTSGGTAALG | |
| | | CLVKDYFPEPVTVSWNSGALTSGVHTFPAVLQSSGLYSLSSVVTVPSSS | |
| | | LGTQTYICNVNHKPSNTKVDKKVEPKSCGGGGSGGGGSGGGGSGGGGSE | |
| | | VQLVESGGGLVQPGGSLRLSCAASGFTFSTYAMNWVRQAPGKGLEWVGR | |
| | | IRSKYNNYATYYADSVKGRFTISRDDSKNSLYLQMNSLKTEDTAVYYCV | |
| | | RHGNFGNSYVSWFAYWGQGTLVTVSSPAPEAAGPSVFLFPPKPKDTLMI | |
| | | SRTPEVTCVVVDVSHEDPEVKFNWYVDGVEVHNAKTKPREEQYNSTYRV | |
| | | VSVLTVLHQDWLNGKEYKCKVSNKALPAPIEKTISKAKGQPREPQVYTL | |
| | | PPSREEMTKNQVSLWCLVKGFYPSDIAVEWESNGQPENNYKTTPPVLDS | |
| | | DGSFFLYSKLTVDKSRWQQGNVFSCSVMHEALHNHYTQKSLSLSPGK | |
| | 2^{nd} | QVQLVQSGAEVKKPGASVKVSCKASGYTFTSYVMHWVRQKPGQGLEWIG | 297 |
| | chain | YINPYNEGTESTDKFKGRATMTSDKSTSTVYMELSSLRSEDTAVYYCAS | |
| | | IYYGYEGTYFGVWGQGTLVTVSSASTKGPSVFPLAPSSKSTSGGTAALG | |
| | | CLVKDYFPEPVTVSWNSGALTSGVHTFPAVLQSSGLYSLSSVVTVPSSS | |
| | | LGTQTYICNVNHKPSNTKVDKKVEPKSCGGGGSGGGGSGGGGSGGGGSQ | |
| | | VQLVQSGAEVKKPGASVKVSCKASGYTFAGFEMHWVRQAPGQGLEWMGA | |
| | | IDPKTGGTDYNQKFKDRVTMTRDTSISTAYMELSRLRSDDTAVYYCARD | |
| | | LGYFDVWGQGTLVTVSSASVAAPSVFIFPPSDEQLKSGTASVVCLLNNF | |
| | | YPREAKVQWKVDNALQSGNSQESVTEQDSKDSTYSLSSTLTLSKADYEK | |
| | | HKVYACEVTHQGLSSPVTKSFNRGECGGGGSGGGGSGGGGSGGGGSQAV | |
| | | VTQEPSLTVSPGGTVTLTCRSSTGAVTTSNYANWVQQKPGQAPRGLIGG | |
| | | TNKRAPWTPARFSGSLLGGKAALTITGAQAEDEADYYCALWYSNLWVFG | |
| | | GGTKLTVLPAPEAAGPSVFLFPPKPKDTLMISRTPEVTCVVVDVSHEDP | |
| | | EVKFNWYVDGVEVHNAKTKPREEQYNSTYRVVSVLTVLHQDWLNGKEYK | |
| | | CKVSNKALPAPIEKTISKAKGQPREPQVYTLPPSREEMTKNQVSLSCAV | |
| | | KGFYPSDIAVEWESNGQPENNYKTTPPVLDSDGSFFLVSKLTVDKSRWQ | |
| | | QGNVFSCSVMHEALHNRFTQKSLSLSPGK | |
| | 3^{rd} | EIVLTQSPATLSLSPGERATLSCRASSSVSYMHWYQQKPGQAPRPWIYA | 298 |
| | chain | TSNLASGIPARFSGSRSGTDYTLTISSLEPEDFAVYYCQQWSSNTLTFG | |
| | | GGTKVEIKRTVAAPSVFIFPPSDEQLKSGTASVVCLLNNFYPREAKVQW | |
| | | KVDNALQSGNSQESVTEQDSKDSTYSLSSTLTLSKADYEKHKVYACEVT | |
| | | HQGLSSPVTKSFNRGEC | |
| | 4^{th} | QAVVTQEPSLTVSPGGTVTLTCRSSTGAVTTSNYANWVQQKPGQAPRGL | 299 |
| | chain | IGGTNKRAPWTPARFSGSLLGGKAALTITGAQAEDEADYYCALWYSNLW | |
| | | VFGGGTKLTVLSSASTKGPSVFPLAPSSKSTSGGTAALGCLVKDYFPEP | |
| | | VTVSWNSGALTSGVHTFPAVLQSSGLYSLSSVVTVPSSSLGTQTYICNV | |
| | | NHKPSNTKVDKKVEPKSC | |

### Characterization of Anti-B7H3/CD3/CD137 Tri-Specific Antibodies

[0351] These tri-specific antibodies are evaluated for their in vitro and in vivo activity, including binding to target antigen (B7H3, CD3 and CD137), agonistic activity in CD3 and CD137 reporter assay system, activation of immune cells, anti-tumor activity in mouse models.

### Example 10: Anti-B7H3/CD3/CD28 tri-specific antibodies

[0352] Anti-B7H3/CD3/CD28 tri-specific were produced using the same anti-B7H3 and anti-CD3 parent clones disclosed in Example 9 above and the anti-CD28 antibody parent clones CD28 Ab1 or CD28 Ab2. The sequences of the parent antibody clones are provided in Table 1 above.

[0353] cDNAs encoding the V_{H} and V_{L} chains of these parent antibodies were used as the starting materials for making the tri-specific antibodies. CHO-cell transient expression was carried out with plasmids configured for expressing polypeptide chains of the tri-specific antibodies. These antibodies were purified by protein A affinity chromatography.

[0354] The amino acid sequences of the polypeptide chains of the tri-specific antibodies are provided in Table 10 below:

TABLE 10
Exemplary Anti-B7H3/CD3/CD28 Tri-Specific Antibodies

| | | | SED ID |
|---|---|---|---|
| Antibody Clones | | Amino acid sequence | NO: |
| Ly1968 | 1^{st} | QVQLVQSGAEVKKPGASVKVSCKASGYTFTSYVMHWVRQKPGQGLEWIG | 300 |
| | chain | YINPYNEGTESTDKFKGRATMTSDKSTSTVYMELSSLRSEDTAVYYCAS | |
| | | IYYGYEGTYFGVWGQGTLVTVSSASTKGPSVFPLAPSSKSTSGGTAALG | |
| | | CLVKDYFPEPVTVSWNSGALTSGVHTFPAVLQSSGLYSLSSVVTVPSSS | |
| | | LGTQTYICNVNHKPSNTKVDKKVEPKSCGGGGSGGGGSGGGGSGGGGSE | |
| | | VQLVESGGGLVQPGGSLRLSCAASGFTFSTYAMNWVRQAPGKGLEWVGR | |
| | | IRSKYNNYATYYADSVKGRFTISRDDSKNSLYLQMNSLKTEDTAVYYCV | |
| | | RHGNFGNSYVSWFAYWGQGTLVTVSSPAPELLGPSVFLFPPKPKDTLMI | |
| | | SRTPEVTCVVVDVSHEDPEVKFNWYVDGVEVHNAKTKPREEQYNSTYRV | |
| | | VSVLTVLHQDWLNGKEYKCKVSNKALPAPIEKTISKAKGQPREPQVYTL | |
| | | PPSREEMTKNQVSLWCLVKGFYPSDIAVEWESNGQPENNYKTTPPVLDS | |
| | | DGSFFLYSKLTVDKSRWQQGNVFSCSVMHEALHNHYTQKSLSLSPGK | |
| | 2^{nd} | QVQLVQSGAEVVKPGASVKVSCKASGYTFTSYYIHWVRQAPGQGLEWIG | 301 |
| | chain | SIYPGNVNTNYAQKFQGRATLTVDTSISTAYMELSRLRSDDTAVYYCTR | |
| | | SHYGLDWNFDVWGKGTTVTVSSASVAAPSVFIFPPSDEQLKSGTASVVC | |
| | | LLNNFYPREAKVQWKVDNALQSGNSQESVTEQDSKDSTYSLSSTLTLSK | |
| | | ADYEKHKVYACEVTHQGLSSPVTKSFNRGECGGGGSGGGGSGGGGSGGG | |
| | | GSQAVVTQEPSLTVSPGGTVTLTCRSSTGAVTTSNYANWVQQKPGQAPR | |
| | | GLIGGTNKRAPWTPARFSGSLLGGKAALTITGAQAEDEADYYCALWYSN | |
| | | LWVFGGGTKLTVLPAPELLGPSVFLFPPKPKDTLMISRTPEVTCVVVDV | |
| | | SHEDPEVKFNWYVDGVEVHNAKTKPREEQYNSTYRVVSVLTVLHQDWLN | |
| | | GKEYKCKVSNKALPAPIEKTISKAKGQPREPQVYTLPPSREEMTKNQVS | |
| | | LSCAVKGFYPSDIAVEWESNGQPENNYKTTPPVLDSDGSFFLVSKLTVD | |
| | | KSRWQQGNVFSCSVMHEALHNRFTQKSLSLSPGK | |
| | 3^{rd} | EIVLTQSPATLSLSPGERATLSCRASSSVSYMHWYQQKPGQAPRPWIYA | 302 |
| | chain | TSNLASGIPARFSGSRSGTDYTLTISSLEPEDFAVYYCQQWSSNTLTFG | |
| | | GGTKVEIKRTVAAPSVFIFPPSDEQLKSGTASVVCLLNNFYPREAKVQW | |
| | | KVDNALQSGNSQESVTEQDSKDSTYSLSSTLTLSKADYEKHKVYACEVT | |
| | | HQGLSSPVTKSFNRGEC | |
| | 4^{th} | DIQMTQSPSSLSASVGDRVTITCQASQNIYVWLNWYQQKPGKAPKLLIY | 303 |
| | chain | KASNLHTGVPSRFSGSGSGTDFTLTISSLQPEDIATYYCQQGQTYPYTF | |
| | | GQGTKLEIKSSASTKGPSVFPLAPSSKSTSGGTAALGCLVKDYFPEPVT | |
| | | VSWNSGALTSGVHTFPAVLQSSGLYSLSSVVTVPSSSLGTQTYICNVNH | |
| | | KPSNTKVDKKVEPKSC | |
| Ly1969 | 1^{st} | QVQLVQSGAEVKKPGASVKVSCKASGYTFTSYVMHWVRQKPGQGLEWIG | 304 |
| | chain | YINPYNEGTESTDKFKGRATMTSDKSTSTVYMELSSLRSEDTAVYYCAS | |
| | | IYYGYEGTYFGVWGQGTLVTVSSASTKGPSVFPLAPSSKSTSGGTAALG | |
| | | CLVKDYFPEPVTVSWNSGALTSGVHTFPAVLQSSGLYSLSSVVTVPSSS | |
| | | LGTQTYICNVNHKPSNTKVDKKVEPKSCDKTHTCPPCPAPEAAGPSVFL | |
| | | FPPKPKDTLMISRTPEVTCVVVDVSHEDPEVKFNWYVDGVEVHNAKTKP | |
| | | REEQYNSTYRVVSVLTVLHQDWLNGKEYKCKVSNKALPAPIEKTISKAK | |
| | | GQPREPQVYTLPPSREEMTKNQVSLWCLVKGFYPSDIAVEWESNGQPEN | |
| | | NYKTTPPVLDSDGSFFLYSKLTVDKSRWQQGNVFSCSVMHEALHNHYTQ | |
| | | KSLSLSPGGGGGSGGGGSGGGGSGGGGSDIQMTQSPSSLSASVGDRVTI | |
| | | TCQASQNIYVWLNWYQQKPGKAPKLLIYKASNLHTGVPSRFSGSGSGTD | |
| | | FTLTISSLQPEDIATYYCQQGQTYPYTFGQGTKLEIKGGGGsGGGGSGG | |
| | | GGSGGGGSQVQLVQSGAEVVKPGASVKVSCKASGYTFTSYYIHWVRQAP | |
| | | GQGLEWIGSIYPGNVNTNYAQKFQGRATLTVDTSISTAYMELSRLRSDD | |
| | | TAVYYCTRSHYGLDWNFDVWGKGTTVTVSS | |
| | 2^{nd} | QVQLVQSGAEVKKPGASVKVSCKASGYTFTSYVMHWVRQKPGQGLEWIG | 305 |
| | chain | YINPYNEGTESTDKFKGRATMTSDKSTSTVYMELSSLRSEDTAVYYCAS | |
| | | IYYGYEGTYFGVWGQGTLVTVSSASTKGPSVFPLAPSSKSTSGGTAALG | |
| | | CLVKDYFPEPVTVSWNSGALTSGVHTFPAVLQSSGLYSLSSVVTVPSSS | |
| | | LGTQTYICNVNHKPSNTKVDKKVEPKSCGGGGSGGGGSGGGGSGGGGSE | |
| | | VQLVESGGGLVQPGGSLRLSCAASGFTFSTYAMNWVRQAPGKGLEWVGR | |
| | | IRSKYNNYATYYADSVKGRFTISRDDSKNSLYLQMNSLKTEDTAVYYCV | |
| | | RHGNFGNSYVSWFAYWGQGTLVTVSSASVAAPSVFIFPPSDEQLKSGTA | |
| | | SVVCLLNNFYPREAKVQWKVDNALQSGNSQESVTEQDSKDSTYSLSSTL | |
| | | TLSKADYEKHKVYACEVTHQGLSSPVTKSFNRGECDKTHTCPPCPAPEA | |
| | | AGPSVFLFPPKPKDTLMISRTPEVTCVVVDVSHEDPEVKFNWYVDGVEV | |
| | | HNAKTKPREEQYNSTYRVVSVLTVLHQDWLNGKEYKCKVSNKALPAPIE | |
| | | KTISKAKGQPREPQVYTLPPSREEMTKNQVSLSCAVKGFYPSDIAVEWE | |
| | | SNGQPENNYKTTPPVLDSDGSFFLVSKLTVDKSRWQQGNVFSCSVMHEA | |
| | | LHNRFTQKSLSLSPGGGGGSGGGGSGGGGSGGGGSDIQMTQSPSSLSAS | |
| | | VGDRVTITCQASQNIYVWLNWYQQKPGKAPKLLIYKASNLHTGVPSRFS | |
| | | GSGSGTDFTLTISSLQPEDIATYYCQQGQTYPYTFGQGTKLEIKGGGGS | |
| | | GGGGSGGGGSGGGGSQVQLVQSGAEVVKPGASVKVSCKASGYTFTSYYI | |
| | | HWVRQAPGQGLEWIGSIYPGNVNTNYAQKFQGRATLTVDTSISTAYMEL | |
| | | SRLRSDDTAVYYCTRSHYGLDWNFDVWGKGTTVTVSS | |
| | 3^{rd} | EIVLTQSPATLSLSPGERATLSCRASSSVSYMHWYQQKPGQAPRPWIYA | 306 |
| | chain | TSNLASGIPARFSGSRSGTDYTLTISSLEPEDFAVYYCQQWSSNTLTFG | |
| | | GGTKVEIKRTVAAPSVFIFPPSDEQLKSGTASVVCLLNNFYPREAKVQW | |
| | | KVDNALQSGNSQESVTEQDSKDSTYSLSSTLTLSKADYEKHKVYACEVT | |
| | | HQGLSSPVTKSFNRGEC | |
| | 4^{th} | QAVVTQEPSLTVSPGGTVTLTCRSSTGAVTTSNYANWVQQKPGQAPRGL | 307 |
| | chain | IGGTNKRAPWTPARFSGSLLGGKAALTITGAQAEDEADYYCALWYSNLW | |
| | | VFGGGTKLTVLSSASTKGPSVFPLAPSSKSTSGGTAALGCLVKDYFPEP | |
| | | VTVSWNSGALTSGVHTFPAVLQSSGLYSLSSVVTVPSSSLGTQTYICNV | |
| | | NHKPSNTKVDKKVEPKSC | |
| Ly1970 | 1^{st} | QVQLVQSGAEVKKPGASVKVSCKASGYTFTSYVMHWVRQKPGQGLEWIG | 308 |
| | chain | YINPYNEGTESTDKFKGRATMTSDKSTSTVYMELSSLRSEDTAVYYCAS | |
| | | IYYGYEGTYFGVWGQGTLVTVSSASTKGPSVFPLAPSSKSTSGGTAALG | |
| | | CLVKDYFPEPVTVSWNSGALTSGVHTFPAVLQSSGLYSLSSVVTVPSSS | |
| | | LGTQTYICNVNHKPSNTKVDKKVEPKSCDKTHTCPPCPAPEAAGPSVFL | |
| | | FPPKPKDTLMISRTPEVTCVVVDVSHEDPEVKFNWYVDGVEVHNAKTKP | |
| | | REEQYNSTYRVVSVLTVLHQDWLNGKEYKCKVSNKALPAPIEKTISKAK | |
| | | GQPREPQVYTLPPSREEMTKNQVSLWCLVKGFYPSDIAVEWESNGQPEN | |
| | | NYKTTPPVLDSDGSFFLYSKLTVDKSRWQQGNVFSCSVMHEALHNHYTQ | |
| | | KSLSLSPGGGGGSGGGGSGGGGSGGGGSQVQLVQSGAEVVKPGASVKVS | |
| | | CKASGYTFTSYYIHWVRQAPGQGLEWIGSIYPGNVNTNYAQKFQGRATL | |
| | | TVDTSISTAYMELSRLRSDDTAVYYCTRSHYGLDWNFDVWGKGTTVTVS | |
| | | SGGGGSGGGGSGGGGSGGGGSDIQMTQSPSSLSASVGDRVTITCQASQN | |
| | | IYVWLNWYQQKPGKAPKLLIYKASNLHTGVPSRFSGSGSGTDFTLTISS | |
| | | LQPEDIATYYCQQGQTYPYTFGQGTKLEIK | |
| | 2^{nd} | QVQLVQSGAEVKKPGASVKVSCKASGYTFTSYVMHWVRQKPGQGLEWIG | 309 |
| | chain | YINPYNEGTESTDKFKGRATMTSDKSTSTVYMELSSLRSEDTAVYYCAS | |
| | | IYYGYEGTYFGVWGQGTLVTVSSASTKGPSVFPLAPSSKSTSGGTAALG | |
| | | CLVKDYFPEPVTVSWNSGALTSGVHTFPAVLQSSGLYSLSSVVTVPSSS | |
| | | LGTQTYICNVNHKPSNTKVDKKVEPKSCGGGGSGGGGSGGGGSGGGGSE | |
| | | VQLVESGGGLVQPGGSLRLSCAASGFTFSTYAMNWVRQAPGKGLEWVGR | |
| | | IRSKYNNYATYYADSVKGRFTISRDDSKNSLYLQMNSLKTEDTAVYYCV | |
| | | RHGNFGNSYVSWFAYWGQGTLVTVSSASVAAPSVFIFPPSDEQLKSGTA | |
| | | SVVCLLNNFYPREAKVQWKVDNALQSGNSQESVTEQDSKDSTYSLSSTL | |
| | | TLSKADYEKHKVYACEVTHQGLSSPVTKSFNRGECDKTHTCPPCPAPEA | |
| | | AGPSVFLFPPKPKDTLMISRTPEVTCVVVDVSHEDPEVKFNWYVDGVEV | |
| | | HNAKTKPREEQYNSTYRVVSVLTVLHQDWLNGKEYKCKVSNKALPAPIE | |
| | | KTISKAKGQPREPQVYTLPPSREEMTKNQVSLSCAVKGFYPSDIAVEWE | |
| | | SNGQPENNYKTTPPVLDSDGSFFLVSKLTVDKSRWQQGNVFSCSVMHEA | |
| | | LHNRFTQKSLSLSPGGGGGSGGGGSGGGGSGGGGSQVQLVQSGAEVVKP | |
| | | GASVKVSCKASGYTFTSYYIHWVRQAPGQGLEWIGSIYPGNVNTNYAQK | |
| | | FQGRATLTVDTSISTAYMELSRLRSDDTAVYYCTRSHYGLDWNFDVWGK | |
| | | GTTVTVSSGGGGSGGGGsGGGGSGGGGSDIQMTQSPSSLSASVGDRVTI | |
| | | TCQASQNIYVWLNWYQQKPGKAPKLLIYKASNLHTGVPSRFSGSGSGTD | |
| | | FTLTISSLQPEDIATYYCQQGQTYPYTFGQGTKLEIK | |
| | 3^{rd} | EIVLTQSPATLSLSPGERATLSCRASSSVSYMHWYQQKPGQAPRPWIYA | 310 |
| | chain | TSNLASGIPARFSGSRSGTDYTLTISSLEPEDFAVYYCQQWSSNTLTFG | |
| | | GGTKVEIKRTVAAPSVFIFPPSDEQLKSGTASVVCLLNNFYPREAKVQW | |
| | | KVDNALQSGNSQESVTEQDSKDSTYSLSSTLTLSKADYEKHKVYACEVT | |
| | | HQGLSSPVTKSFNRGEC | |
| | 4^{th} | QAVVTQEPSLTVSPGGTVTLTCRSSTGAVTTSNYANWVQQKPGQAPRGL | 311 |
| | chain | IGGTNKRAPWTPARFSGSLLGGKAALTITGAQAEDEADYYCALWYSNLW | |
| | | VFGGGTKLTVLSSASTKGPSVFPLAPSSKSTSGGTAALGCLVKDYFPEP | |
| | | VTVSWNSGALTSGVHTFPAVLQSSGLYSLSSVVTVPSSSLGTQTYICNV | |
| | | NHKPSNTKVDKKVEPKSC | |
| Ly1971 | 1^{st} | QVQLVQSGAEVKKPGASVKVSCKASGYTFTSYVMHWVRQKPGQGLEWIG | 312 |
| | chain | YINPYNEGTESTDKFKGRATMTSDKSTSTVYMELSSLRSEDTAVYYCAS | |
| | | IYYGYEGTYFGVWGQGTLVTVSSASTKGPSVFPLAPSSKSTSGGTAALG | |
| | | CLVKDYFPEPVTVSWNSGALTSGVHTFPAVLQSSGLYSLSSVVTVPSSS | |
| | | LGTQTYICNVNHKPSNTKVDKKVEPKSCDKTHTCPPCPAPEAAGPSVFL | |
| | | FPPKPKDTLMISRTPEVTCVVVDVSHEDPEVKFNWYVDGVEVHNAKTKP | |
| | | REEQYNSTYRVVSVLTVLHQDWLNGKEYKCKVSNKALPAPIEKTISKAK | |
| | | GQPREPQVYTLPPSREEMTKNQVSLWCLVKGFYPSDIAVEWESNGQPEN | |
| | | NYKTTPPVLDSDGSFFLYSKLTVDKSRWQQGNVFSCSVMHEALHNHYTQ | |
| | | KSLSLSPGK | |
| | 2^{nd} | QVQLVQSGAEVKKPGASVKVSCKASGYTFTSYVMHWVRQKPGQGLEWIG | 313 |
| | chain | YINPYNEGTESTDKFKGRATMTSDKSTSTVYMELSSLRSEDTAVYYCAS | |
| | | IYYGYEGTYFGVWGQGTLVTVSSASTKGPSVFPLAPSSKSTSGGTAALG | |
| | | CLVKDYFPEPVTVSWNSGALTSGVHTFPAVLQSSGLYSLSSVVTVPSSS | |
| | | LGTQTYICNVNHKPSNTKVDKKVEPKSCGGGGSGGGGSGGGGSGGGGSE | |
| | | VQLVESGGGLVQPGGSLRLSCAASGFTFSTYAMNWVRQAPGKGLEWVGR | |
| | | IRSKYNNYATYYADSVKGRFTISRDDSKNSLYLQMNSLKTEDTAVYYCV | |
| | | RHGNFGNSYVSWFAYWGQGTLVTVSSASVAAPSVFIFPPSDEQLKSGTA | |
| | | SVVCLLNNFYPREAKVQWKVDNALQSGNSQESVTEQDSKDSTYSLSSTL | |
| | | TLSKADYEKHKVYACEVTHQGLSSPVTKSFNRGECDKTHTCPPCPAPEA | |
| | | AGPSVFLFPPKPKDTLMISRTPEVTCVVVDVSHEDPEVKFNWYVDGVEV | |
| | | HNAKTKPREEQYNSTYRVVSVLTVLHQDWLNGKEYKCKVSNKALPAPIE | |
| | | KTISKAKGQPREPQVYTLPPSREEMTKNQVSLSCAVKGFYPSDIAVEWE | |
| | | SNGQPENNYKTTPPVLDSDGSFFLVSKLTVDKSRWQQGNVFSCSVMHEA | |
| | | LHNRFTQKSLSLSPGGGGGSGGGGSGGGGSGGGGSDIQMTQSPSSLSAS | |
| | | VGDRVTITCQASQNIYVWLNWYQQKPGKAPKLLIYKASNLHTGVPSRFS | |
| | | GSGSGTDFTLTISSLQPEDIATYYCQQGQTYPYTFGQGTKLEIKGGGGS | |
| | | GGGGSGGGGSGGGGSQVQLVQSGAEVVKPGASVKVSCKASGYTFTSYYI | |
| | | HWVRQAPGQGLEWIGSIYPGNVNTNYAQKFQGRATLTVDTSISTAYMEL | |
| | | SRLRSDDTAVYYCTRSHYGLDWNFDVWGKGTTVTVSS | |
| | 3^{rd} | EIVLTQSPATLSLSPGERATLSCRASSSVSYMHWYQQKPGQAPRPWIYA | 314 |
| | chain | TSNLASGIPARFSGSRSGTDYTLTISSLEPEDFAVYYCQQWSSNTLTFG | |
| | | GGTKVEIKRTVAAPSVFIFPPSDEQLKSGTASVVCLLNNFYPREAKVQW | |
| | | KVDNALQSGNSQESVTEQDSKDSTYSLSSTLTLSKADYEKHKVYACEVT | |
| | | HQGLSSPVTKSFNRGEC | |
| | 4^{th} | QAVVTQEPSLTVSPGGTVTLTCRSSTGAVTTSNYANWVQQKPGQAPRGL | 315 |
| | chain | IGGTNKRAPWTPARFSGSLLGGKAALTITGAQAEDEADYYCALWYSNLW | |
| | | VFGGGTKLTVLSSASTKGPSVFPLAPSSKSTSGGTAALGCLVKDYFPEP | |
| | | VTVSWNSGALTSGVHTFPAVLQSSGLYSLSSVVTVPSSSLGTQTYICNV | |
| | | NHKPSNTKVDKKVEPKSC | |
| Ly1972 | 1^{st} | QVQLVQSGAEVKKPGASVKVSCKASGYTFTSYVMHWVRQKPGQGLEWIG | 316 |
| | chain | YINPYNEGTESTDKFKGRATMTSDKSTSTVYMELSSLRSEDTAVYYCAS | |
| | | IYYGYEGTYFGVWGQGTLVTVSSASTKGPSVFPLAPSSKSTSGGTAALG | |
| | | CLVKDYFPEPVTVSWNSGALTSGVHTFPAVLQSSGLYSLSSVVTVPSSS | |
| | | LGTQTYICNVNHKPSNTKVDKKVEPKSCDKTHTCPPCPAPEAAGPSVFL | |
| | | FPPKPKDTLMISRTPEVTCVVVDVSHEDPEVKFNWYVDGVEVHNAKTKP | |
| | | REEQYNSTYRVVSVLTVLHQDWLNGKEYKCKVSNKALPAPIEKTISKAK | |
| | | GQPREPQVYTLPPSREEMTKNQVSLWCLVKGFYPSDIAVEWESNGQPEN | |
| | | NYKTTPPVLDSDGSFFLYSKLTVDKSRWQQGNVFSCSVMHEALHNHYTQ | |
| | | KSLSLSPGK | |
| | 2^{nd} | QVQLVQSGAEVKKPGASVKVSCKASGYTFTSYVMHWVRQKPGQGLEWIG | 317 |
| | chain | YINPYNEGTESTDKFKGRATMTSDKSTSTVYMELSSLRSEDTAVYYCAS | |
| | | IYYGYEGTYFGVWGQGTLVTVSSASTKGPSVFPLAPSSKSTSGGTAALG | |
| | | CLVKDYFPEPVTVSWNSGALTSGVHTFPAVLQSSGLYSLSSVVTVPSSS | |
| | | LGTQTYICNVNHKPSNTKVDKKVEPKSCGGGGSGGGGSGGGGSGGGGSE | |
| | | VQLVESGGGLVQPGGSLRLSCAASGFTFSTYAMNWVRQAPGKGLEWVGR | |
| | | IRSKYNNYATYYADSVKGRFTISRDDSKNSLYLQMNSLKTEDTAVYYCV | |
| | | RHGNFGNSYVSWFAYWGQGTLVTVSSASVAAPSVFIFPPSDEQLKSGTA | |
| | | SVVCLLNNFYPREAKVQWKVDNALQSGNSQESVTEQDSKDSTYSLSSTL | |
| | | TLSKADYEKHKVYACEVTHQGLSSPVTKSFNRGECDKTHTCPPCPAPEA | |
| | | AGPSVFLFPPKPKDTLMISRTPEVTCVVVDVSHEDPEVKFNWYVDGVEV | |
| | | HNAKTKPREEQYNSTYRVVSVLTVLHQDWLNGKEYKCKVSNKALPAPIE | |
| | | KTISKAKGQPREPQVYTLPPSREEMTKNQVSLSCAVKGFYPSDIAVEWE | |
| | | SNGQPENNYKTTPPVLDSDGSFFLVSKLTVDKSRWQQGNVFSCSVMHEA | |
| | | LHNRFTQKSLSLSPGGGGGSGGGGSGGGGSGGGGSQVQLVQSGAEVVKP | |
| | | GASVKVSCKASGYTFTSYYIHWVRQAPGQGLEWIGSIYPGNVNTNYAQK | |
| | | FQGRATLTVDTSISTAYMELSRLRSDDTAVYYCTRSHYGLDWNFDVWGK | |
| | | GTTVTVSSGGGGSGGGGSGGGGSGGGGSDIQMTQSPSSLSASVGDRVTI | |
| | | TCQASQNIYVWLNWYQQKPGKAPKLLIYKASNLHTGVPSRFSGSGSGTD | |
| | | FTLTISSLQPEDIATYYCQQGQTYPYTFGQGTKLEIK | |
| | 3^{rd} | EIVLTQSPATLSLSPGERATLSCRASSSVSYMHWYQQKPGQAPRPWIYA | 318 |
| | chain | TSNLASGIPARFSGSRSGTDYTLTISSLEPEDFAVYYCQQWSSNTLTFG | |
| | | GGTKVEIKRTVAAPSVFIFPPSDEQLKSGTASVVCLLNNFYPREAKVQW | |
| | | KVDNALQSGNSQESVTEQDSKDSTYSLSSTLTLSKADYEKHKVYACEVT | |
| | | HQGLSSPVTKSFNRGEC | |
| | 4^{th} | QAVVTQEPSLTVSPGGTVTLTCRSSTGAVTTSNYANWVQQKPGQAPRGL | 319 |
| | chain | IGGTNKRAPWTPARFSGSLLGGKAALTITGAQAEDEADYYCALWYSNLW | |
| | | VFGGGTKLTVLSSASTKGPSVFPLAPSSKSTSGGTAALGCLVKDYFPEP | |
| | | VTVSWNSGALTSGVHTFPAVLQSSGLYSLSSVVTVPSSSLGTQTYICNV | |
| | | NHKPSNTKVDKKVEPKSC | |
| Ly1973 | 1^{st} | QVQLVQSGAEVKKPGASVKVSCKASGYTFTSYVMHWVRQKPGQGLEWIG | 320 |
| | chain | YINPYNEGTESTDKFKGRATMTSDKSTSTVYMELSSLRSEDTAVYYCAS | |
| | | IYYGYEGTYFGVWGQGTLVTVSSASTKGPSVFPLAPSSKSTSGGTAALG | |
| | | CLVKDYFPEPVTVSWNSGALTSGVHTFPAVLQSSGLYSLSSVVTVPSSS | |
| | | LGTQTYICNVNHKPSNTKVDKKVEPKSCDKTHTCPPCPAPEAAGPSVFL | |
| | | FPPKPKDTLMISRTPEVTCVVVDVSHEDPEVKFNWYVDGVEVHNAKTKP | |
| | | REEQYNSTYRVVSVLTVLHQDWLNGKEYKCKVSNKALPAPIEKTISKAK | |
| | | GQPREPQVYTLPPSREEMTKNQVSLWCLVKGFYPSDIAVEWESNGQPEN | |
| | | NYKTTPPVLDSDGSFFLYSKLTVDKSRWQQGNVFSCSVMHEALHNHYTQ | |
| | | KSLSLSPGGGGGSGGGGSGGGGSGGGGSDIQMTQSPSSLSASVGDRVTI | |
| | | TCQASQNIYVWLNWYQQKPGKAPKLLIYKASNLHTGVPSRFSGSGSGTD | |
| | | FTLTISSLQPEDIATYYCQQGQTYPYTFGQGTKLEIKGGGGSGGGGSGG | |
| | | GGSGGGGSQVQLVQSGAEVVKPGASVKVSCKASGYTFTSYYIHWVRQAP | |
| | | GQGLEWIGSIYPGNVNTNYAQKFQGRATLTVDTSISTAYMELSRLRSDD | |
| | | TAVYYCTRSHYGLDWNFDVWGKGTTVTVSS | |
| | 2^{nd} | QVQLVQSGAEVKKPGASVKVSCKASGYTFTSYVMHWVRQKPGQGLEWIG | 321 |
| | chain | YINPYNEGTESTDKFKGRATMTSDKSTSTVYMELSSLRSEDTAVYYCAS | |
| | | IYYGYEGTYFGVWGQGTLVTVSSASTKGPSVFPLAPSSKSTSGGTAALG | |
| | | CLVKDYFPEPVTVSWNSGALTSGVHTFPAVLQSSGLYSLSSVVTVPSSS | |
| | | LGTQTYICNVNHKPSNTKVDKKVEPKSCGGGGSGGGGSGGGGSGGGGSE | |
| | | VQLVESGGGLVQPGGSLRLSCAASGFTFSTYAMNWVRQAPGKGLEWVGR | |
| | | IRSKYNNYATYYADSVKGRFTISRDDSKNSLYLQMNSLKTEDTAVYYCV | |
| | | RHGNFGNSYVSWFAYWGQGTLVTVSSASVAAPSVFIFPPSDEQLKSGTA | |
| | | SVVCLLNNFYPREAKVQWKVDNALQSGNSQESVTEQDSKDSTYSLSSTL | |
| | | TLSKADYEKHKVYACEVTHQGLSSPVTKSFNRGECDKTHTCPPCPAPEA | |
| | | AGPSVFLFPPKPKDTLMISRTPEVTCVVVDVSHEDPEVKFNWYVDGVEV | |
| | | HNAKTKPREEQYNSTYRVVSVLTVLHQDWLNGKEYKCKVSNKALPAPIE | |
| | | KTISKAKGQPREPQVYTLPPSREEMTKNQVSLSCAVKGFYPSDIAVEWE | |
| | | SNGQPENNYKTTPPVLDSDGSFFLVSKLTVDKSRWQQGNVFSCSVMHEA | |
| | | LHNRFTQKSLSLSPGK | |
| | 3^{rd} | EIVLTQSPATLSLSPGERATLSCRASSSVSYMHWYQQKPGQAPRPWIYA | 322 |
| | chain | TSNLASGIPARFSGSRSGTDYTLTISSLEPEDFAVYYCQQWSSNTLTFG | |
| | | GGTKVEIKRTVAAPSVFIFPPSDEQLKSGTASVVCLLNNFYPREAKVQW | |
| | | KVDNALQSGNSQESVTEQDSKDSTYSLSSTLTLSKADYEKHKVYACEVT | |
| | | HQGLSSPVTKSFNRGEC | |
| | 4^{th} | QAVVTQEPSLTVSPGGTVTLTCRSSTGAVTTSNYANWVQQKPGQAPRGL | 323 |
| | chain | IGGTNKRAPWTPARFSGSLLGGKAALTITGAQAEDEADYYCALWYSNLW | |
| | | VFGGGTKLTVLSSASTKGPSVFPLAPSSKSTSGGTAALGCLVKDYFPEP | |
| | | VTVSWNSGALTSGVHTFPAVLQSSGLYSLSSVVTVPSSSLGTQTYICNV | |
| | | NHKPSNTKVDKKVEPKSC | |
| Ly1974 | 1^{st} | QVQLVQSGAEVKKPGASVKVSCKASGYTFTSYVMHWVRQKPGQGLEWIG | 324 |
| | chain | YINPYNEGTESTDKFKGRATMTSDKSTSTVYMELSSLRSEDTAVYYCAS | |
| | | IYYGYEGTYFGVWGQGTLVTVSSASTKGPSVFPLAPSSKSTSGGTAALG | |
| | | CLVKDYFPEPVTVSWNSGALTSGVHTFPAVLQSSGLYSLSSVVTVPSSS | |
| | | LGTQTYICNVNHKPSNTKVDKKVEPKSCDKTHTCPPCPAPEAAGPSVFL | |
| | | FPPKPKDTLMISRTPEVTCVVVDVSHEDPEVKFNWYVDGVEVHNAKTKP | |
| | | REEQYNSTYRVVSVLTVLHQDWLNGKEYKCKVSNKALPAPIEKTISKAK | |
| | | GQPREPQVYTLPPSREEMTKNQVSLWCLVKGFYPSDIAVEWESNGQPEN | |
| | | NYKTTPPVLDSDGSFFLYSKLTVDKSRWQQGNVFSCSVMHEALHNHYTQ | |
| | | KSLSLSPGGGGGSGGGGSGGGGSGGGGSQVQLVQSGAEVVKPGASVKVS | |
| | | CKASGYTFTSYYIHWVRQAPGQGLEWIGSIYPGNVNTNYAQKFQGRATL | |
| | | TVDTSISTAYMELSRLRSDDTAVYYCTRSHYGLDWNFDVWGKGTTVTVS | |
| | | SGGGGSGGGGSGGGGSGGGGSDIQMTQSPSSLSASVGDRVTITCQASQN | |
| | | IYVWLNWYQQKPGKAPKLLIYKASNLHTGVPSRFSGSGSGTDFTLTISS | |
| | | LQPEDIATYYCQQGQTYPYTFGQGTKLEIK | |
| | 2^{nd} | QVQLVQSGAEVKKPGASVKVSCKASGYTFTSYVMHWVRQKPGQGLEWIG | 325 |
| | chain | YINPYNEGTESTDKFKGRATMTSDKSTSTVYMELSSLRSEDTAVYYCAS | |
| | | IYYGYEGTYFGVWGQGTLVTVSSASTKGPSVFPLAPSSKSTSGGTAALG | |
| | | CLVKDYFPEPVTVSWNSGALTSGVHTFPAVLQSSGLYSLSSVVTVPSSS | |
| | | LGTQTYICNVNHKPSNTKVDKKVEPKSCGGGGSGGGGSGGGGSGGGGSE | |
| | | VQLVESGGGLVQPGGSLRLSCAASGFTFSTYAMNWVRQAPGKGLEWVGR | |
| | | IRSKYNNYATYYADSVKGRFTISRDDSKNSLYLQMNSLKTEDTAVYYCV | |
| | | RHGNFGNSYVSWFAYWGQGTLVTVSSASVAAPSVFIFPPSDEQLKSGTA | |
| | | SVVCLLNNFYPREAKVQWKVDNALQSGNSQESVTEQDSKDSTYSLSSTL | |
| | | TLSKADYEKHKVYACEVTHQGLSSPVTKSFNRGECDKTHTCPPCPAPEA | |
| | | AGPSVFLFPPKPKDTLMISRTPEVTCVVVDVSHEDPEVKFNWYVDGVEV | |
| | | HNAKTKPREEQYNSTYRVVSVLTVLHQDWLNGKEYKCKVSNKALPAPIE | |
| | | KTISKAKGQPREPQVYTLPPSREEMTKNQVSLSCAVKGFYPSDIAVEWE | |
| | | SNGQPENNYKTTPPVLDSDGSFFLVSKLTVDKSRWQQGNVFSCSVMHEA | |
| | | LHNRFTQKSLSLSPGK | |
| | 3^{rd} | EIVLTQSPATLSLSPGERATLSCRASSSVSYMHWYQQKPGQAPRPWIYA | 326 |
| | chain | TSNLASGIPARFSGSRSGTDYTLTISSLEPEDFAVYYCQQWSSNTLTFG | |
| | | GGTKVEIKRTVAAPSVFIFPPSDEQLKSGTASVVCLLNNFYPREAKVQW | |
| | | KVDNALQSGNSQESVTEQDSKDSTYSLSSTLTLSKADYEKHKVYACEVT | |
| | | HQGLSSPVTKSFNRGEC | |
| | 4^{th} | QAVVTQEPSLTVSPGGTVTLTCRSSTGAVTTSNYANWVQQKPGQAPRGL | 327 |
| | chain | IGGTNKRAPWTPARFSGSLLGGKAALTITGAQAEDEADYYCALWYSNLW | |
| | | VFGGGTKLTVLSSASTKGPSVFPLAPSSKSTSGGTAALGCLVKDYFPEP | |
| | | VTVSWNSGALTSGVHTFPAVLQSSGLYSLSSVVTVPSSSLGTQTYICNV | |
| | | NHKPSNTKVDKKVEPKSC | |
| Ly1975 | 1^{st} | QVQLVQSGAEVKKPGASVKVSCKASGYTFTSYVMHWVRQKPGQGLEWIG | 328 |
| | chain | YINPYNEGTESTDKFKGRATMTSDKSTSTVYMELSSLRSEDTAVYYCAS | |
| | | IYYGYEGTYFGVWGQGTLVTVSSASTKGPSVFPLAPSSKSTSGGTAALG | |
| | | CLVKDYFPEPVTVSWNSGALTSGVHTFPAVLQSSGLYSLSSVVTVPSSS | |
| | | LGTQTYICNVNHKPSNTKVDKKVEPKSCDKTHTCPPCPAPEAAGPSVEL | |
| | | FPPKPKDTLMISRTPEVTCVVVDVSHEDPEVKFNWYVDGVEVHNAKTKP | |
| | | REEQYNSTYRVVSVLTVLHQDWLNGKEYKCKVSNKALPAPIEKTISKAK | |
| | | GQPREPQVYTLPPSREEMTKNQVSLWCLVKGFYPSDIAVEWESNGQPEN | |
| | | NYKTTPPVLDSDGSFFLYSKLTVDKSRWQQGNVFSCSVMHEALHNHYTQ | |
| | | KSLSLSPGGGGGSGGGGSGGGGSGGGGSQVQLVQSGAEVVKPGASVKVS | |
| | | CKASGYTFTSYYIHWVRQAPGQGLEWIGSIYPGNVNTNYAQKFQGRATL | |
| | | TVDTSISTAYMELSRLRSDDTAVYYCTRSHYGLDWNFDVWGKGTTVTVS | |
| | | S | |
| | 2^{nd} | QVQLVQSGAEVKKPGASVKVSCKASGYTFTSYVMHWVRQKPGQGLEWIG | 329 |
| | chain | YINPYNEGTESTDKFKGRATMTSDKSTSTVYMELSSLRSEDTAVYYCAS | |
| | | IYYGYEGTYFGVWGQGTLVTVSSASTKGPSVFPLAPSSKSTSGGTAALG | |
| | | CLVKDYFPEPVTVSWNSGALTSGVHTFPAVLQSSGLYSLSSVVTVPSSS | |
| | | LGTQTYICNVNHKPSNTKVDKKVEPKSCGGGGSGGGGSGGGGSGGGGSE | |
| | | VQLVESGGGLVQPGGSLRLSCAASGFTFSTYAMNWVRQAPGKGLEWVGR | |
| | | IRSKYNNYATYYADSVKGRFTISRDDSKNSLYLQMNSLKTEDTAVYYCV | |
| | | RHGNFGNSYVSWFAYWGQGTLVTVSSASVAAPSVFIFPPSDEQLKSGTA | |
| | | SVVCLLNNFYPREAKVQWKVDNALQSGNSQESVTEQDSKDSTYSLSSTL | |
| | | TLSKADYEKHKVYACEVTHQGLSSPVTKSFNRGECDKTHTCPPCPAPEA | |
| | | AGPSVFLFPPKPKDTLMISRTPEVTCVVVDVSHEDPEVKFNWYVDGVEV | |
| | | HNAKTKPREEQYNSTYRVVSVLTVLHQDWLNGKEYKCKVSNKALPAPIE | |
| | | KTISKAKGQPREPQVYTLPPSREEMTKNQVSLSCAVKGFYPSDIAVEWE | |
| | | SNGQPENNYKTTPPVLDSDGSFFLVSKLTVDKSRWQQGNVFSCSVMHEA | |
| | | LHNRFTQKSLSLSPGGGGGSGGGGSGGGGSGGGGSDIQMTQSPSSLSAS | |
| | | VGDRVTITCQASQNIYVWLNWYQQKPGKAPKLLIYKASNLHTGVPSRFS | |
| | | GSGSGTDFTLTISSLQPEDIATYYCQQGQTYPYTFGQGTKLEIK | |
| | 3^{rd} | EIVLTQSPATLSLSPGERATLSCRASSSVSYMHWYQQKPGQAPRPWIYA | 330 |
| | chain | TSNLASGIPARFSGSRSGTDYTLTISSLEPEDFAVYYCQQWSSNTLTFG | |
| | | GGTKVEIKRTVAAPSVFIFPPSDEQLKSGTASVVCLLNNFYPREAKVQW | |
| | | KVDNALQSGNSQESVTEQDSKDSTYSLSSTLTLSKADYEKHKVYACEVT | |
| | | HQGLSSPVTKSFNRGEC | |
| | 4^{th} | QAVVTQEPSLTVSPGGTVTLTCRSSTGAVTTSNYANWVQQKPGQAPRGL | 331 |
| | chain | IGGTNKRAPWTPARFSGSLLGGKAALTITGAQAEDEADYYCALWYSNLW | |
| | | VFGGGTKLTVLSSASTKGPSVFPLAPSSKSTSGGTAALGCLVKDYFPEP | |
| | | VTVSWNSGALTSGVHTFPAVLQSSGLYSLSSVVTVPSSSLGTQTYICNV | |
| | | NHKPSNTKVDKKVEPKSC | |
| Ly1976 | 1^{st} | QVQLVQSGAEVKKPGASVKVSCKASGYTFTSYVMHWVRQKPGQGLEWIG | 332 |
| | chain | YINPYNEGTESTDKFKGRATMTSDKSTSTVYMELSSLRSEDTAVYYCAS | |
| | | IYYGYEGTYFGVWGQGTLVTVSSASTKGPSVFPLAPSSKSTSGGTAALG | |
| | | CLVKDYFPEPVTVSWNSGALTSGVHTFPAVLQSSGLYSLSSVVTVPSSS | |
| | | LGTQTYICNVNHKPSNTKVDKKVEPKSCDKTHTCPPCPAPEAAGPSVFL | |
| | | FPPKPKDTLMISRTPEVTCVVVDVSHEDPEVKFNWYVDGVEVHNAKTKP | |
| | | REEQYNSTYRVVSVLTVLHQDWLNGKEYKCKVSNKALPAPIEKTISKAK | |
| | | GQPREPQVYTLPPSREEMTKNQVSLWCLVKGFYPSDIAVEWESNGQPEN | |
| | | NYKTTPPVLDSDGSFFLYSKLTVDKSRWQQGNVFSCSVMHEALHNHYTQ | |
| | | KSLSLSPGGGGGSGGGGSGGGGSGGGGSDIQMTQSPSSLSASVGDRVTI | |
| | | TCQASQNIYVWLNWYQQKPGKAPKLLIYKASNLHTGVPSRFSGSGSGTD | |
| | | FTLTISSLQPEDIATYYCQQGQTYPYTFGQGTKLEIKGGGGSGGGGSGG | |
| | | GGSGGGGSQVQLVQSGAEVVKPGASVKVSCKASGYTFTSYYIHWVRQAP | |
| | | GQGLEWIGSIYPGNVNTNYAQKFQGRATLTVDTSISTAYMELSRLRSDD | |
| | | TAVYYCTRSHYGLDWNFDVWGKGTTVTVSS | |
| | 2^{nd} | QVQLVQSGAEVKKPGASVKVSCKASGYTFTSYVMHWVRQKPGQGLEWIG | 333 |
| | chain | YINPYNEGTESTDKFKGRATMTSDKSTSTVYMELSSLRSEDTAVYYCAS | |
| | | IYYGYEGTYFGVWGQGTLVTVSSASTKGPSVFPLAPSSKSTSGGTAALG | |
| | | CLVKDYFPEPVTVSWNSGALTSGVHTFPAVLQSSGLYSLSSVVTVPSSS | |
| | | LGTQTYICNVNHKPSNTKVDKKVEPKSCGGGGSGGGGSGGGGSGGGGSQ | |
| | | AVVTQEPSLTVSPGGTVTLTCRSSTGAVTTSNYANWVQQKPGQAPRGLI | |
| | | GGTNKRAPWTPARFSGSLLGGKAALTITGAQAEDEADYYCALWYSNLWV | |
| | | FGGGTKLTVLGGGGSGGGGSGGGGSGGGGSEVQLVESGGGLVQPGGSLR | |
| | | LSCAASGFTFSTYAMNWVRQAPGKGLEWVGRIRSKYNNYATYYADSVKG | |
| | | RFTISRDDSKNSLYLQMNSLKTEDTAVYYCVRHGNFGNSYVSWFAYWGQ | |
| | | GTLVTVSSDKTHTCPPCPAPEAAGPSVFLFPPKPKDTLMISRTPEVTCV | |
| | | VVDVSHEDPEVKFNWYVDGVEVHNAKTKPREEQYNSTYRVVSVLTVLHQ | |
| | | DWLNGKEYKCKVSNKALPAPIEKTISKAKGQPREPQVYTLPPSREEMTK | |
| | | NQVSLSCAVKGFYPSDIAVEWESNGQPENNYKTTPPVLDSDGSFFLVSK | |
| | | LTVDKSRWQQGNVFSCSVMHEALHNRFTQKSLSLSPGK | |
| | 3^{rd} | EIVLTQSPATLSLSPGERATLSCRASSSVSYMHWYQQKPGQAPRPWIYA | 334 |
| | chain | TSNLASGIPARFSGSRSGTDYTLTISSLEPEDFAVYYCQQWSSNTLTFG | |
| | | GGTKVEIKRTVAAPSVFIFPPSDEQLKSGTASVVCLLNNFYPREAKVQW | |
| | | KVDNALQSGNSQESVTEQDSKDSTYSLSSTLTLSKADYEKHKVYACEVT | |
| | | HQGLSSPVTKSFNRGEC | |
| Ly1977 | 1^{st} | QVQLVQSGAEVKKPGASVKVSCKASGYTFTSYVMHWVRQKPGQGLEWIG | 335 |
| | chain | YINPYNEGTESTDKFKGRATMTSDKSTSTVYMELSSLRSEDTAVYYCAS | |
| | | IYYGYEGTYFGVWGQGTLVTVSSASTKGPSVFPLAPSSKSTSGGTAALG | |
| | | CLVKDYFPEPVTVSWNSGALTSGVHTFPAVLQSSGLYSLSSVVTVPSSS | |
| | | LGTQTYICNVNHKPSNTKVDKKVEPKSCDKTHTCPPCPAPEAAGPSVFL | |
| | | FPPKPKDTLMISRTPEVTCVVVDVSHEDPEVKFNWYVDGVEVHNAKTKP | |
| | | REEQYNSTYRVVSVLTVLHQDWLNGKEYKCKVSNKALPAPIEKTISKAK | |
| | | GQPREPQVYTLPPSREEMTKNQVSLWCLVKGFYPSDIAVEWESNGQPEN | |
| | | NYKTTPPVLDSDGSFFLYSKLTVDKSRWQQGNVFSCSVMHEALHNHYTQ | |
| | | KSLSLSPGGGGGSGGGGSGGGGSGGGGSQVQLVQSGAEVVKPGASVKVS | |
| | | CKASGYTFTSYYIHWVRQAPGQGLEWIGSIYPGNVNTNYAQKFQGRATL | |
| | | TVDTSISTAYMELSRLRSDDTAVYYCTRSHYGLDWNFDVWGKGTTVTVS | |
| | | SGGGGSGGGGSGGGGSGGGGSDIQMTQSPSSLSASVGDRVTITCQASQN | |
| | | IYVWLNWYQQKPGKAPKLLIYKASNLHTGVPSRFSGSGSGTDFTLTISS | |
| | | LQPEDIATYYCQQGQTYPYTFGQGTKLEIK | |
| | 2^{nd} | QVQLVQSGAEVKKPGASVKVSCKASGYTFTSYVMHWVRQKPGQGLEWIG | 336 |
| | chain | YINPYNEGTESTDKFKGRATMTSDKSTSTVYMELSSLRSEDTAVYYCAS | |
| | | IYYGYEGTYFGVWGQGTLVTVSSASTKGPSVFPLAPSSKSTSGGTAALG | |
| | | CLVKDYFPEPVTVSWNSGALTSGVHTFPAVLQSSGLYSLSSVVTVPSSS | |
| | | LGTQTYICNVNHKPSNTKVDKKVEPKSCGGGGSGGGGSGGGGSGGGGSQ | |
| | | AVVTQEPSLTVSPGGTVTLTCRSSTGAVTTSNYANWVQQKPGQAPRGLI | |
| | | GGTNKRAPWTPARFSGSLLGGKAALTITGAQAEDEADYYCALWYSNLWV | |
| | | FGGGTKLTVLGGGGSGGGGSGGGGSGGGGSEVQLVESGGGLVQPGGSLR | |
| | | LSCAASGFTFSTYAMNWVRQAPGKGLEWVGRIRSKYNNYATYYADSVKG | |
| | | RFTISRDDSKNSLYLQMNSLKTEDTAVYYCVRHGNFGNSYVSWFAYWGQ | |
| | | GTLVTVSSDKTHTCPPCPAPEAAGPSVFLFPPKPKDTLMISRTPEVTCV | |
| | | VVDVSHEDPEVKFNWYVDGVEVHNAKTKPREEQYNSTYRVVSVLTVLHQ | |
| | | DWLNGKEYKCKVSNKALPAPIEKTISKAKGQPREPQVYTLPPSREEMTK | |
| | | NQVSLSCAVKGFYPSDIAVEWESNGQPENNYKTTPPVLDSDGSFFLVSK | |
| | | LTVDKSRWQQGNVFSCSVMHEALHNRFTQKSLSLSPGK | |
| | 3^{rd} | EIVLTQSPATLSLSPGERATLSCRASSSVSYMHWYQQKPGQAPRPWIYA | 337 |
| | chain | TSNLASGIPARFSGSRSGTDYTLTISSLEPEDFAVYYCQQWSSNTLTFG | |
| | | GGTKVEIKRTVAAPSVFIFPPSDEQLKSGTASVVCLLNNFYPREAKVQW | |
| | | KVDNALQSGNSQESVTEQDSKDSTYSLSSTLTLSKADYEKHKVYACEVT | |
| | | HQGLSSPVTKSFNRGEC | |
| Ly1978 | 1^{st} | QVQLVQSGAEVKKPGASVKVSCKASGYTFTSYVMHWVRQKPGQGLEWIG | 338 |
| | chain | YINPYNEGTESTDKFKGRATMTSDKSTSTVYMELSSLRSEDTAVYYCAS | |
| | | IYYGYEGTYFGVWGQGTLVTVSSASTKGPSVFPLAPSSKSTSGGTAALG | |
| | | CLVKDYFPEPVTVSWNSGALTSGVHTFPAVLQSSGLYSLSSVVTVPSSS | |
| | | LGTQTYICNVNHKPSNTKVDKKVEPKSCDKTHTCPPCPAPEAAGPSVFL | |
| | | FPPKPKDTLMISRTPEVTCVVVDVSHEDPEVKFNWYVDGVEVHNAKTKP | |
| | | REEQYNSTYRVVSVLTVLHQDWLNGKEYKCKVSNKALPAPIEKTISKAK | |
| | | GQPREPQVYTLPPSREEMTKNQVSLWCLVKGFYPSDIAVEWESNGQPEN | |
| | | NYKTTPPVLDSDGSFFLYSKLTVDKSRWQQGNVFSCSVMHEALHNHYTQ | |
| | | KSLSLSPGGGGGSGGGGSGGGGSGGGGSDIQMTQSPSSLSASVGDRVTI | |
| | | TCQASQNIYVWLNWYQQKPGKAPKLLIYKASNLHTGVPSRFSGSGSGTD | |
| | | FTLTISSLQPEDIATYYCQQGQTYPYTFGQGTKLEIKGGGGSGGGGSGG | |
| | | GGSGGGGSQVQLVQSGAEVVKPGASVKVSCKASGYTFTSYYIHWVRQAP | |
| | | GQGLEWIGSIYPGNVNTNYAQKFQGRATLTVDTSISTAYMELSRLRSDD | |
| | | TAVYYCTRSHYGLDWNFDVWGKGTTVTVSS | |
| | 2^{nd} | QVQLVQSGAEVKKPGASVKVSCKASGYTFTSYVMHWVRQKPGQGLEWIG | 339 |
| | chain | YINPYNEGTESTDKFKGRATMTSDKSTSTVYMELSSLRSEDTAVYYCAS | |
| | | IYYGYEGTYFGVWGQGTLVTVSSASTKGPSVFPLAPSSKSTSGGTAALG | |
| | | CLVKDYFPEPVTVSWNSGALTSGVHTFPAVLQSSGLYSLSSVVTVPSSS | |
| | | LGTQTYICNVNHKPSNTKVDKKVEPKSCGGGGSGGGGSGGGGSGGGGSQ | |
| | | AVVTQEPSLTVSPGGTVTLTCRSSTGAVTTSNYANWVQQKPGQAPRGLI | |
| | | GGTNKRAPWTPARFSGSLLGGKAALTITGAQAEDEADYYCALWYSNLWV | |
| | | FGGGTKLTVLGGGGSGGGGSGGGGSGGGGSEVQLVESGGGLVQPGGSLR | |
| | | LSCAASGFTFSTYAMNWVRQAPGKGLEWVGRIRSKYNNYATYYADSVKG | |
| | | RFTISRDDSKNSLYLQMNSLKTEDTAVYYCVRHGNFGNSYVSWFAYWGQ | |
| | | GTLVTVSSDKTHTCPPCPAPEAAGPSVFLFPPKPKDTLMISRTPEVTCV | |
| | | VVDVSHEDPEVKFNWYVDGVEVHNAKTKPREEQYNSTYRVVSVLTVLHQ | |
| | | DWLNGKEYKCKVSNKALPAPIEKTISKAKGQPREPQVYTLPPSREEMTK | |
| | | NQVSLSCAVKGFYPSDIAVEWESNGQPENNYKTTPPVLDSDGSFFLVSK | |
| | | LTVDKSRWQQGNVFSCSVMHEALHNRFTQKSLSLSPGGGGGSGGGGSGG | |
| | | GGSGGGGSDIQMTQSPSSLSASVGDRVTITCQASQNIYVWLNWYQQKPG | |
| | | KAPKLLIYKASNLHTGVPSRFSGSGSGTDFTLTISSLQPEDIATYYCQQ | |
| | | GQTYPYTFGQGTKLEIKGGGGSGGGGSGGGGSGGGGSQVQLVQSGAEVV | |
| | | KPGASVKVSCKASGYTFTSYYIHWVRQAPGQGLEWIGSIYPGNVNTNYA | |
| | | QKFQGRATLTVDTSISTAYMELSRLRSDDTAVYYCTRSHYGLDWNFDVW | |
| | | GKGTTVTVSS | |
| | 3^{rd} | EIVLTQSPATLSLSPGERATLSCRASSSVSYMHWYQQKPGQAPRPWIYA | 340 |
| | chain | TSNLASGIPARFSGSRSGTDYTLTISSLEPEDFAVYYCQQWSSNTLTFG | |
| | | GGTKVEIKRTVAAPSVFIFPPSDEQLKSGTASVVCLLNNFYPREAKVQW | |
| | | KVDNALQSGNSQESVTEQDSKDSTYSLSSTLTLSKADYEKHKVYACEVT | |
| | | HQGLSSPVTKSFNRGEC | |
| Ly1979 | 1^{st} | QVQLVQSGAEVKKPGASVKVSCKASGYTFTSYVMHWVRQKPGQGLEWIG | 341 |
| | chain | YINPYNEGTESTDKFKGRATMTSDKSTSTVYMELSSLRSEDTAVYYCAS | |
| | | IYYGYEGTYFGVWGQGTLVTVSSASTKGPSVFPLAPSSKSTSGGTAALG | |
| | | CLVKDYFPEPVTVSWNSGALTSGVHTFPAVLQSSGLYSLSSVVTVPSSS | |
| | | LGTQTYICNVNHKPSNTKVDKKVEPKSCDKTHTCPPCPAPEAAGPSVFL | |
| | | FPPKPKDTLMISRTPEVTCVVVDVSHEDPEVKFNWYVDGVEVHNAKTKP | |
| | | REEQYNSTYRVVSVLTVLHQDWLNGKEYKCKVSNKALPAPIEKTISKAK | |
| | | GQPREPQVYTLPPSREEMTKNQVSLWCLVKGFYPSDIAVEWESNGQPEN | |
| | | NYKTTPPVLDSDGSFFLYSKLTVDKSRWQQGNVFSCSVMHEALHNHYTQ | |
| | | KSLSLSPGGGGGSGGGGSGGGGSGGGGSQVQLVQSGAEVVKPGASVKVS | |
| | | CKASGYTFTSYYIHWVRQAPGQGLEWIGSIYPGNVNTNYAQKFQGRATL | |
| | | TVDTSISTAYMELSRLRSDDTAVYYCTRSHYGLDWNFDVWGKGTTVTVS | |
| | | SGGGGSGGGGSGGGGSGGGGSDIQMTQSPSSLSASVGDRVTITCQASQN | |
| | | IYVWLNWYQQKPGKAPKLLIYKASNLHTGVPSRFSGSGSGTDFTLTISS | |
| | | LQPEDIATYYCQQGQTYPYTFGQGTKLEIK | |
| | 2^{nd} | QVQLVQSGAEVKKPGASVKVSCKASGYTFTSYVMHWVRQKPGQGLEWIG | 342 |
| | chain | YINPYNEGTESTDKFKGRATMTSDKSTSTVYMELSSLRSEDTAVYYCAS | |
| | | IYYGYEGTYFGVWGQGTLVTVSSASTKGPSVFPLAPSSKSTSGGTAALG | |
| | | CLVKDYFPEPVTVSWNSGALTSGVHTFPAVLQSSGLYSLSSVVTVPSSS | |
| | | LGTQTYICNVNHKPSNTKVDKKVEPKSCGGGGSGGGGSGGGGSGGGGSQ | |
| | | AVVTQEPSLTVSPGGTVTLTCRSSTGAVTTSNYANWVQQKPGQAPRGLI | |
| | | GGTNKRAPWTPARFSGSLLGGKAALTITGAQAEDEADYYCALWYSNLWV | |
| | | FGGGTKLTVLGGGGSGGGGSGGGGSGGGGSEVQLVESGGGLVQPGGSLR | |
| | | LSCAASGFTFSTYAMNWVRQAPGKGLEWVGRIRSKYNNYATYYADSVKG | |
| | | RFTISRDDSKNSLYLQMNSLKTEDTAVYYCVRHGNFGNSYVSWFAYWGQ | |
| | | GTLVTVSSDKTHTCPPCPAPEAAGPSVFLFPPKPKDTLMISRTPEVTCV | |
| | | VVDVSHEDPEVKFNWYVDGVEVHNAKTKPREEQYNSTYRVVSVLTVLHQ | |
| | | DWLNGKEYKCKVSNKALPAPIEKTISKAKGQPREPQVYTLPPSREEMTK | |
| | | NQVSLSCAVKGFYPSDIAVEWESNGQPENNYKTTPPVLDSDGSFFLVSK | |
| | | LTVDKSRWQQGNVFSCSVMHEALHNRFTQKSLSLSPGGGGGSGGGGSGG | |
| | | GGSGGGGSQVQLVQSGAEVVKPGASVKVSCKASGYTFTSYYIHWVRQAP | |
| | | GQGLEWIGSIYPGNVNTNYAQKFQGRATLTVDTSISTAYMELSRLRSDD | |
| | | TAVYYCTRSHYGLDWNFDVWGKGTTVTVSSGGGGSGGGGSGGGGSGGGG | |
| | | SDIQMTQSPSSLSASVGDRVTITCQASQNIYVWLNWYQQKPGKAPKLLI | |
| | | YKASNLHTGVPSRFSGSGSGTDFTLTISSLQPEDIATYYCQQGQTYPYT | |
| | | FGQGTKLEIK | |
| | 3^{rd} | EIVLTQSPATLSLSPGERATLSCRASSSVSYMHWYQQKPGQAPRPWIYA | 343 |
| | chain | TSNLASGIPARFSGSRSGTDYTLTISSLEPEDFAVYYCQQWSSNTLTFG | |
| | | GGTKVEIKRTVAAPSVFIFPPSDEQLKSGTASVVCLLNNFYPREAKVQW | |
| | | KVDNALQSGNSQESVTEQDSKDSTYSLSSTLTLSKADYEKHKVYACEVT | |
| | | HQGLSSPVTKSFNRGEC | |
| Ly1980 | 1^{st} | QVQLVQSGAEVKKPGASVKVSCKASGYTFTSYVMHWVRQKPGQGLEWIG | 344 |
| | chain | YINPYNEGTESTDKFKGRATMTSDKSTSTVYMELSSLRSEDTAVYYCAS | |
| | | IYYGYEGTYFGVWGQGTLVTVSSASTKGPSVFPLAPSSKSTSGGTAALG | |
| | | CLVKDYFPEPVTVSWNSGALTSGVHTFPAVLQSSGLYSLSSVVTVPSSS | |
| | | LGTQTYICNVNHKPSNTKVDKKVEPKSCDKTHTCPPCPAPEAAGPSVFL | |
| | | FPPKPKDTLMISRTPEVTCVVVDVSHEDPEVKFNWYVDGVEVHNAKTKP | |
| | | REEQYNSTYRVVSVLTVLHQDWLNGKEYKCKVSNKALPAPIEKTISKAK | |
| | | GQPREPQVYTLPPSREEMTKNQVSLWCLVKGFYPSDIAVEWESNGQPEN | |
| | | NYKTTPPVLDSDGSFFLYSKLTVDKSRWQQGNVFSCSVMHEALHNHYTQ | |
| | | KSLSLSPGK | |
| | 2^{nd} | QVQLVQSGAEVKKPGASVKVSCKASGYTFTSYVMHWVRQKPGQGLEWIG | 345 |
| | chain | YINPYNEGTESTDKFKGRATMTSDKSTSTVYMELSSLRSEDTAVYYCAS | |
| | | IYYGYEGTYFGVWGQGTLVTVSSASTKGPSVFPLAPSSKSTSGGTAALG | |
| | | CLVKDYFPEPVTVSWNSGALTSGVHTFPAVLQSSGLYSLSSVVTVPSSS | |
| | | LGTQTYICNVNHKPSNTKVDKKVEPKSCGGGGSGGGGSGGGGSGGGGSQ | |
| | | AVVTQEPSLTVSPGGTVTLTCRSSTGAVTTSNYANWVQQKPGQAPRGLI | |
| | | GGTNKRAPWTPARFSGSLLGGKAALTITGAQAEDEADYYCALWYSNLWV | |
| | | FGGGTKLTVLGGGGSGGGGSGGGGSGGGGSEVQLVESGGGLVQPGGSLR | |
| | | LSCAASGFTFSTYAMNWVRQAPGKGLEWVGRIRSKYNNYATYYADSVKG | |
| | | RFTISRDDSKNSLYLQMNSLKTEDTAVYYCVRHGNFGNSYVSWFAYWGQ | |
| | | GTLVTVSSDKTHTCPPCPAPEAAGPSVFLFPPKPKDTLMISRTPEVTCV | |
| | | VVDVSHEDPEVKFNWYVDGVEVHNAKTKPREEQYNSTYRVVSVLTVLHQ | |
| | | DWLNGKEYKCKVSNKALPAPIEKTISKAKGQPREPQVYTLPPSREEMTK | |
| | | NQVSLSCAVKGFYPSDIAVEWESNGQPENNYKTTPPVLDSDGSFFLVSK | |
| | | LTVDKSRWQQGNVFSCSVMHEALHNRFTQKSLSLSPGGGGGSGGGGSGG | |
| | | GGSGGGGSDIQMTQSPSSLSASVGDRVTITCQASQNIYVWLNWYQQKPG | |
| | | KAPKLLIYKASNLHTGVPSRFSGSGSGTDFTLTISSLQPEDIATYYCQQ | |
| | | GQTYPYTFGQGTKLEIKGGGGSGGGGSGGGGSGGGGSQVQLVQSGAEVV | |
| | | KPGASVKVSCKASGYTFTSYYIHWVRQAPGQGLEWIGSIYPGNVNTNYA | |
| | | QKFQGRATLTVDTSISTAYMELSRLRSDDTAVYYCTRSHYGLDWNFDVW | |
| | | GKGTTVTVSS | |
| | 3^{rd} | EIVLTQSPATLSLSPGERATLSCRASSSVSYMHWYQQKPGQAPRPWIYA | 346 |
| | chain | TSNLASGIPARFSGSRSGTDYTLTISSLEPEDFAVYYCQQWSSNTLTFG | |
| | | GGTKVEIKRTVAAPSVFIFPPSDEQLKSGTASVVCLLNNFYPREAKVQW | |
| | | KVDNALQSGNSQESVTEQDSKDSTYSLSSTLTLSKADYEKHKVYACEVT | |
| | | HQGLSSPVTKSFNRGEC | |
| Ly1981 | 1^{st} | QVQLVQSGAEVKKPGASVKVSCKASGYTFTSYVMHWVRQKPGQGLEWIG | 347 |
| | chain | YINPYNEGTESTDKFKGRATMTSDKSTSTVYMELSSLRSEDTAVYYCAS | |
| | | IYYGYEGTYFGVWGQGTLVTVSSASTKGPSVFPLAPSSKSTSGGTAALG | |
| | | CLVKDYFPEPVTVSWNSGALTSGVHTFPAVLQSSGLYSLSSVVTVPSSS | |
| | | LGTQTYICNVNHKPSNTKVDKKVEPKSCDKTHTCPPCPAPEAAGPSVFL | |
| | | FPPKPKDTLMISRTPEVTCVVVDVSHEDPEVKFNWYVDGVEVHNAKTKP | |
| | | REEQYNSTYRVVSVLTVLHQDWLNGKEYKCKVSNKALPAPIEKTISKAK | |
| | | GQPREPQVYTLPPSREEMTKNQVSLWCLVKGFYPSDIAVEWESNGQPEN | |
| | | NYKTTPPVLDSDGSFFLYSKLTVDKSRWQQGNVFSCSVMHEALHNHYTQ | |
| | | KSLSLSPGK | |
| | 2^{nd} | QVQLVQSGAEVKKPGASVKVSCKASGYTFTSYVMHWVRQKPGQGLEWIG | 348 |
| | chain | YINPYNEGTESTDKFKGRATMTSDKSTSTVYMELSSLRSEDTAVYYCAS | |
| | | IYYGYEGTYFGVWGQGTLVTVSSASTKGPSVFPLAPSSKSTSGGTAALG | |
| | | CLVKDYFPEPVTVSWNSGALTSGVHTFPAVLQSSGLYSLSSVVTVPSSS | |
| | | LGTQTYICNVNHKPSNTKVDKKVEPKSCGGGGSGGGGSGGGGSGGGGSQ | |
| | | AVVTQEPSLTVSPGGTVTLTCRSSTGAVTTSNYANWVQQKPGQAPRGLI | |
| | | GGTNKRAPWTPARFSGSLLGGKAALTITGAQAEDEADYYCALWYSNLWV | |
| | | FGGGTKLTVLGGGGSGGGGSGGGGSGGGGSEVQLVESGGGLVQPGGSLR | |
| | | LSCAASGFTFSTYAMNWVRQAPGKGLEWVGRIRSKYNNYATYYADSVKG | |
| | | RFTISRDDSKNSLYLQMNSLKTEDTAVYYCVRHGNFGNSYVSWFAYWGQ | |
| | | GTLVTVSSDKTHTCPPCPAPEAAGPSVFLFPPKPKDTLMISRTPEVTCV | |
| | | VVDVSHEDPEVKFNWYVDGVEVHNAKTKPREEQYNSTYRVVSVLTVLHQ | |
| | | DWLNGKEYKCKVSNKALPAPIEKTISKAKGQPREPQVYTLPPSREEMTK | |
| | | NQVSLSCAVKGFYPSDIAVEWESNGQPENNYKTTPPVLDSDGSFFLVSK | |
| | | LTVDKSRWQQGNVFSCSVMHEALHNRFTQKSLSLSPGGGGGSGGGGSGG | |
| | | GGSGGGGSQVQLVQSGAEVVKPGASVKVSCKASGYTFTSYYIHWVRQAP | |
| | | GQGLEWIGSIYPGNVNTNYAQKFQGRATLTVDTSISTAYMELSRLRSDD | |
| | | TAVYYCTRSHYGLDWNFDVWGKGTTVTVSSGGGGSGGGGSGGGGSGGGG | |
| | | SDIQMTQSPSSLSASVGDRVTITCQASQNIYVWLNWYQQKPGKAPKLLI | |
| | | YKASNLHTGVPSRFSGSGSGTDFTLTISSLQPEDIATYYCQQGQTYPYT | |
| | | FGQGTKLEIK | |
| | 3^{rd} | EIVLTQSPATLSLSPGERATLSCRASSSVSYMHWYQQKPGQAPRPWIYA | 349 |
| | chain | TSNLASGIPARFSGSRSGTDYTLTISSLEPEDFAVYYCQQWSSNTLTFG | |
| | | GGTKVEIKRTVAAPSVFIFPPSDEQLKSGTASVVCLLNNFYPREAKVQW | |
| | | KVDNALQSGNSQESVTEQDSKDSTYSLSSTLTLSKADYEKHKVYACEVT | |
| | | HQGLSSPVTKSFNRGEC | |
| Ly1982 | 1^{st} | QVQLVQSGAEVKKPGASVKVSCKASGYTFTSYVMHWVRQKPGQGLEWIG | 350 |
| | chain | YINPYNEGTESTDKFKGRATMTSDKSTSTVYMELSSLRSEDTAVYYCAS | |
| | | IYYGYEGTYFGVWGQGTLVTVSSASTKGPSVFPLAPSSKSTSGGTAALG | |
| | | CLVKDYFPEPVTVSWNSGALTSGVHTFPAVLQSSGLYSLSSVVTVPSSS | |
| | | LGTQTYICNVNHKPSNTKVDKKVEPKSCGGGGSGGGGSGGGGSGGGGSE | |
| | | VQLVESGGGLVQPGGSLRLSCAASGFTFSTYAMNWVRQAPGKGLEWVGR | |
| | | IRSKYNNYATYYADSVKGRFTISRDDSKNSLYLQMNSLKTEDTAVYYCV | |
| | | RHGNFGNSYVSWFAYWGQGTLVTVSSPAPEAAGPSVFLFPPKPKDTLMI | |
| | | SRTPEVTCVVVDVSHEDPEVKFNWYVDGVEVHNAKTKPREEQYNSTYRV | |
| | | VSVLTVLHQDWLNGKEYKCKVSNKALPAPIEKTISKAKGQPREPQVYTL | |
| | | PPSREEMTKNQVSLWCLVKGFYPSDIAVEWESNGQPENNYKTTPPVLDS | |
| | | DGSFFLYSKLTVDKSRWQQGNVFSCSVMHEALHNHYTQKSLSLSPGGGG | |
| | | GSGGGGSGGGGSGGGGSDIQMTQSPSSLSASVGDRVTITCQASQNIYVW | |
| | | LNWYQQKPGKAPKLLIYKASNLHTGVPSRFSGSGSGTDFTLTISSLQPE | |
| | | DIATYYCQQGQTYPYTFGQGTKLEIKGGGGSGGGGSGGGGSGGGGSQVQ | |
| | | LVQSGAEVVKPGASVKVSCKASGYTFTSYYIHWVRQAPGQGLEWIGSIY | |
| | | PGNVNTNYAQKFQGRATLTVDTSISTAYMELSRLRSDDTAVYYCTRSHY | |
| | | GLDWNFDVWGKGTTVTVSS | |
| | 2^{nd} | QVQLVQSGAEVKKPGASVKVSCKASGYTFTSYVMHWVRQKPGQGLEWIG | 351 |
| | chain | YINPYNEGTESTDKFKGRATMTSDKSTSTVYMELSSLRSEDTAVYYCAS | |
| | | IYYGYEGTYFGVWGQGTLVTVSSASTKGPSVFPLAPSSKSTSGGTAALG | |
| | | CLVKDYFPEPVTVSWNSGALTSGVHTFPAVLQSSGLYSLSSVVTVPSSS | |
| | | LGTQTYICNVNHKPSNTKVDKKVEPKSCGGGGSGGGGSGGGGSGGGGSQ | |
| | | AVVTQEPSLTVSPGGTVTLTCRSSTGAVTTSNYANWVQQKPGQAPRGLI | |
| | | GGTNKRAPWTPARFSGSLLGGKAALTITGAQAEDEADYYCALWYSNLWV | |
| | | FGGGTKLTVLPAPEAAGPSVFLFPPKPKDTLMISRTPEVTCVVVDVSHE | |
| | | DPEVKFNWYVDGVEVHNAKTKPREEQYNSTYRVVSVLTVLHQDWLNGKE | |
| | | YKCKVSNKALPAPIEKTISKAKGQPREPQVYTLPPSREEMTKNQVSLSC | |
| | | AVKGFYPSDIAVEWESNGQPENNYKTTPPVLDSDGSFFLVSKLTVDKSR | |
| | | WQQGNVFSCSVMHEALHNRFTQKSLSLSPGGGGGSGGGGSGGGGSGGGG | |
| | | SDIQMTQSPSSLSASVGDRVTITCQASQNIYVWLNWYQQKPGKAPKLLI | |
| | | YKASNLHTGVPSRFSGSGSGTDFTLTISSLQPEDIATYYCQQGQTYPYT | |
| | | FGQGTKLEIKGGGGSGGGGSGGGGSGGGGSQVQLVQSGAEVVKPGASVK | |
| | | VSCKASGYTFTSYYIHWVRQAPGQGLEWIGSIYPGNVNTNYAQKFQGRA | |
| | | TLTVDTSISTAYMELSRLRSDDTAVYYCTRSHYGLDWNFDVWGKGTTVT | |
| | | VSS | |
| | 3^{rd} | EIVLTQSPATLSLSPGERATLSCRASSSVSYMHWYQQKPGQAPRPWIYA | 352 |
| | chain | TSNLASGIPARFSGSRSGTDYTLTISSLEPEDFAVYYCQQWSSNTLTFG | |
| | | GGTKVEIKRTVAAPSVFIFPPSDEQLKSGTASVVCLLNNFYPREAKVQW | |
| | | KVDNALQSGNSQESVTEQDSKDSTYSLSSTLTLSKADYEKHKVYACEVT | |
| | | HQGLSSPVTKSFNRGEC | |
| Ly1983 | 1^{st} | QVQLVQSGAEVKKPGASVKVSCKASGYTFTSYVMHWVRQKPGQGLEWIG | 353 |
| | chain | YINPYNEGTESTDKFKGRATMTSDKSTSTVYMELSSLRSEDTAVYYCAS | |
| | | IYYGYEGTYFGVWGQGTLVTVSSASTKGPSVFPLAPSSKSTSGGTAALG | |
| | | CLVKDYFPEPVTVSWNSGALTSGVHTFPAVLQSSGLYSLSSVVTVPSSS | |
| | | LGTQTYICNVNHKPSNTKVDKKVEPKSCGGGGSGGGGSGGGGSGGGGSE | |
| | | VQLVESGGGLVQPGGSLRLSCAASGFTFSTYAMNWVRQAPGKGLEWVGR | |
| | | IRSKYNNYATYYADSVKGRFTISRDDSKNSLYLQMNSLKTEDTAVYYCV | |
| | | RHGNFGNSYVSWFAYWGQGTLVTVSSPAPEAAGPSVFLFPPKPKDTLMI | |
| | | SRTPEVTCVVVDVSHEDPEVKFNWYVDGVEVHNAKTKPREEQYNSTYRV | |
| | | VSVLTVLHQDWLNGKEYKCKVSNKALPAPIEKTISKAKGQPREPQVYTL | |
| | | PPSREEMTKNQVSLWCLVKGFYPSDIAVEWESNGQPENNYKTTPPVLDS | |
| | | DGSFFLYSKLTVDKSRWQQGNVFSCSVMHEALHNHYTQKSLSLSPGGGG | |
| | | GSGGGGSGGGGSGGGGSQVQLVQSGAEVVKPGASVKVSCKASGYTFTSY | |
| | | YIHWVRQAPGQGLEWIGSIYPGNVNTNYAQKFQGRATLTVDTSISTAYM | |
| | | ELSRLRSDDTAVYYCTRSHYGLDWNFDVWGKGTTVTVSSGGGGSGGGGS | |
| | | GGGGSGGGGSDIQMTQSPSSLSASVGDRVTITCQASQNIYVWLNWYQQK | |
| | | PGKAPKLLIYKASNLHTGVPSRFSGSGSGTDFTLTISSLQPEDIATYYC | |
| | | QQGQTYPYTFGQGTKLEIK | |
| | 2^{nd} | QVQLVQSGAEVKKPGASVKVSCKASGYTFTSYVMHWVRQKPGQGLEWIG | 354 |
| | chain | YINPYNEGTESTDKFKGRATMTSDKSTSTVYMELSSLRSEDTAVYYCAS | |
| | | IYYGYEGTYFGVWGQGTLVTVSSASTKGPSVFPLAPSSKSTSGGTAALG | |
| | | CLVKDYFPEPVTVSWNSGALTSGVHTFPAVLQSSGLYSLSSVVTVPSSS | |
| | | LGTQTYICNVNHKPSNTKVDKKVEPKSCGGGGSGGGGSGGGGSGGGGSQ | |
| | | AVVTQEPSLTVSPGGTVTLTCRSSTGAVTTSNYANWVQQKPGQAPRGLI | |
| | | GGTNKRAPWTPARFSGSLLGGKAALTITGAQAEDEADYYCALWYSNLWV | |
| | | FGGGTKLTVLPAPEAAGPSVFLFPPKPKDTLMISRTPEVTCVVVDVSHE | |
| | | DPEVKFNWYVDGVEVHNAKTKPREEQYNSTYRVVSVLTVLHQDWLNGKE | |
| | | YKCKVSNKALPAPIEKTISKAKGQPREPQVYTLPPSREEMTKNQVSLSC | |
| | | AVKGFYPSDIAVEWESNGQPENNYKTTPPVLDSDGSFFLVSKLTVDKSR | |
| | | WQQGNVFSCSVMHEALHNRFTQKSLSLSPGGGGGSGGGGSGGGGSGGGG | |
| | | SQVQLVQSGAEVVKPGASVKVSCKASGYTFTSYYIHWVRQAPGQGLEWI | |
| | | GSIYPGNVNTNYAQKFQGRATLTVDTSISTAYMELSRLRSDDTAVYYCT | |
| | | RSHYGLDWNFDVWGKGTTVTVSSGGGGSGGGGSGGGGSGGGGSDIQMTQ | |
| | | SPSSLSASVGDRVTITCQASQNIYVWLNWYQQKPGKAPKLLIYKASNLH | |
| | | TGVPSRFSGSGSGTDFTLTISSLQPEDIATYYCQQGQTYPYTFGQGTKL | |
| | | EIK | |
| | 3^{rd} | EIVLTQSPATLSLSPGERATLSCRASSSVSYMHWYQQKPGQAPRPWIYA | 355 |
| | chain | TSNLASGIPARFSGSRSGTDYTLTISSLEPEDFAVYYCQQWSSNTLTFG | |
| | | GGTKVEIKRTVAAPSVFIFPPSDEQLKSGTASVVCLLNNFYPREAKVQW | |
| | | KVDNALQSGNSQESVTEQDSKDSTYSLSSTLTLSKADYEKHKVYACEVT | |
| | | HQGLSSPVTKSFNRGEC | |
| Ly1984 | 1^{st} | QVQLVQSGAEVKKPGASVKVSCKASGYTFTSYVMHWVRQKPGQGLEWIG | 356 |
| | chain | YINPYNEGTESTDKFKGRATMTSDKSTSTVYMELSSLRSEDTAVYYCAS | |
| | | IYYGYEGTYFGVWGQGTLVTVSSASTKGPSVFPLAPSSKSTSGGTAALG | |
| | | CLVKDYFPEPVTVSWNSGALTSGVHTFPAVLQSSGLYSLSSVVTVPSSS | |
| | | LGTQTYICNVNHKPSNTKVDKKVEPKSCGGGGSGGGGSGGGGSGGGGSE | |
| | | VQLVESGGGLVQPGGSLRLSCAASGFTFSTYAMNWVRQAPGKGLEWVGR | |
| | | IRSKYNNYATYYADSVKGRFTISRDDSKNSLYLQMNSLKTEDTAVYYCV | |
| | | RHGNFGNSYVSWFAYWGQGTLVTVSSPAPEAAGPSVFLFPPKPKDTLMI | |
| | | SRTPEVTCVVVDVSHEDPEVKFNWYVDGVEVHNAKTKPREEQYNSTYRV | |
| | | VSVLTVLHQDWLNGKEYKCKVSNKALPAPIEKTISKAKGQPREPQVYTL | |
| | | PPSREEMTKNQVSLWCLVKGFYPSDIAVEWESNGQPENNYKTTPPVLDS | |
| | | DGSFFLYSKLTVDKSRWQQGNVFSCSVMHEALHNHYTQKSLSLSPGGGG | |
| | | GSGGGGSGGGGSGGGGSDIQMTQSPSSLSASVGDRVTITCQASQNIYVW | |
| | | LNWYQQKPGKAPKLLIYKASNLHTGVPSRFSGSGSGTDFTLTISSLQPE | |
| | | DIATYYCQQGQTYPYTFGQGTKLEIKGGGGSGGGGSGGGGSGGGGSQVQ | |
| | | LVQSGAEVVKPGASVKVSCKASGYTFTSYYIHWVRQAPGQGLEWIGSIY | |
| | | PGNVNTNYAQKFQGRATLTVDTSISTAYMELSRLRSDDTAVYYCTRSHY | |
| | | GLDWNFDVWGKGTTVTVSS | |
| | 2^{nd} | QVQLVQSGAEVKKPGASVKVSCKASGYTFTSYVMHWVRQKPGQGLEWIG | 357 |
| | chain | YINPYNEGTESTDKFKGRATMTSDKSTSTVYMELSSLRSEDTAVYYCAS | |
| | | IYYGYEGTYFGVWGQGTLVTVSSASTKGPSVFPLAPSSKSTSGGTAALG | |
| | | CLVKDYFPEPVTVSWNSGALTSGVHTFPAVLQSSGLYSLSSVVTVPSSS | |
| | | LGTQTYICNVNHKPSNTKVDKKVEPKSCGGGGSGGGGSGGGGSGGGGSQ | |
| | | AVVTQEPSLTVSPGGTVTLTCRSSTGAVTTSNYANWVQQKPGQAPRGLI | |
| | | GGTNKRAPWTPARFSGSLLGGKAALTITGAQAEDEADYYCALWYSNLWV | |
| | | FGGGTKLTVLPAPEAAGPSVFLFPPKPKDTLMISRTPEVTCVVVDVSHE | |
| | | DPEVKFNWYVDGVEVHNAKTKPREEQYNSTYRVVSVLTVLHQDWLNGKE | |
| | | YKCKVSNKALPAPIEKTISKAKGQPREPQVYTLPPSREEMTKNQVSLSC | |
| | | AVKGFYPSDIAVEWESNGQPENNYKTTPPVLDSDGSFFLVSKLTVDKSR | |
| | | WQQGNVFSCSVMHEALHNRFTQKSLSLSPGK | |
| | 3^{rd} | EIVLTQSPATLSLSPGERATLSCRASSSVSYMHWYQQKPGQAPRPWIYA | 358 |
| | chain | TSNLASGIPARFSGSRSGTDYTLTISSLEPEDFAVYYCQQWSSNTLTFG | |
| | | GGTKVEIKRTVAAPSVFIFPPSDEQLKSGTASVVCLLNNFYPREAKVQW | |
| | | KVDNALQSGNSQESVTEQDSKDSTYSLSSTLTLSKADYEKHKVYACEVT | |
| | | HQGLSSPVTKSFNRGEC | |
| Ly1985 | 1^{st} | QVQLVQSGAEVKKPGASVKVSCKASGYTFTSYVMHWVRQKPGQGLEWIG | 359 |
| | chain | YINPYNEGTESTDKFKGRATMTSDKSTSTVYMELSSLRSEDTAVYYCAS | |
| | | IYYGYEGTYFGVWGQGTLVTVSSASTKGPSVFPLAPSSKSTSGGTAALG | |
| | | CLVKDYFPEPVTVSWNSGALTSGVHTFPAVLQSSGLYSLSSVVTVPSSS | |
| | | LGTQTYICNVNHKPSNTKVDKKVEPKSCGGGGSGGGGSGGGGSGGGGSE | |
| | | VQLVESGGGLVQPGGSLRLSCAASGFTFSTYAMNWVRQAPGKGLEWVGR | |
| | | IRSKYNNYATYYADSVKGRFTISRDDSKNSLYLQMNSLKTEDTAVYYCV | |
| | | RHGNFGNSYVSWFAYWGQGTLVTVSSPAPEAAGPSVFLFPPKPKDTLMI | |
| | | SRTPEVTCVVVDVSHEDPEVKFNWYVDGVEVHNAKTKPREEQYNSTYRV | |
| | | VSVLTVLHQDWLNGKEYKCKVSNKALPAPIEKTISKAKGQPREPQVYTL | |
| | | PPSREEMTKNQVSLWCLVKGFYPSDIAVEWESNGQPENNYKTTPPVLDS | |
| | | DGSFFLYSKLTVDKSRWQQGNVFSCSVMHEALHNHYTQKSLSLSPGGGG | |
| | | GSGGGGSGGGGSGGGGSQVQLVQSGAEVVKPGASVKVSCKASGYTFTSY | |
| | | YIHWVRQAPGQGLEWIGSIYPGNVNTNYAQKFQGRATLTVDTSISTAYM | |
| | | ELSRLRSDDTAVYYCTRSHYGLDWNFDVWGKGTTVTVSSGGGGSGGGGS | |
| | | GGGGSGGGGSDIQMTQSPSSLSASVGDRVTITCQASQNIYVWLNWYQQK | |
| | | PGKAPKLLIYKASNLHTGVPSRFSGSGSGTDFTLTISSLQPEDIATYYC | |
| | | QQGQTYPYTFGQGTKLEIK | |
| | 2^{nd} | QVQLVQSGAEVKKPGASVKVSCKASGYTFTSYVMHWVRQKPGQGLEWIG | 360 |
| | chain | YINPYNEGTESTDKFKGRATMTSDKSTSTVYMELSSLRSEDTAVYYCAS | |
| | | IYYGYEGTYFGVWGQGTLVTVSSASTKGPSVFPLAPSSKSTSGGTAALG | |
| | | CLVKDYFPEPVTVSWNSGALTSGVHTFPAVLQSSGLYSLSSVVTVPSSS | |
| | | LGTQTYICNVNHKPSNTKVDKKVEPKSCGGGGSGGGGSGGGGSGGGGSQ | |
| | | AVVTQEPSLTVSPGGTVTLTCRSSTGAVTTSNYANWVQQKPGQAPRGLI | |
| | | GGTNKRAPWTPARFSGSLLGGKAALTITGAQAEDEADYYCALWYSNLWV | |
| | | FGGGTKLTVLPAPEAAGPSVFLFPPKPKDTLMISRTPEVTCVVVDVSHE | |
| | | DPEVKFNWYVDGVEVHNAKTKPREEQYNSTYRVVSVLTVLHQDWLNGKE | |
| | | YKCKVSNKALPAPIEKTISKAKGQPREPQVYTLPPSREEMTKNQVSLSC | |
| | | AVKGFYPSDIAVEWESNGQPENNYKTTPPVLDSDGSFFLVSKLTVDKSR | |
| | | WQQGNVFSCSVMHEALHNRFTQKSLSLSPGK | |
| | 3^{rd} | EIVLTQSPATLSLSPGERATLSCRASSSVSYMHWYQQKPGQAPRPWIYA | 361 |
| | chain | TSNLASGIPARFSGSRSGTDYTLTISSLEPEDFAVYYCQQWSSNTLTFG | |
| | | GGTKVEIKRTVAAPSVFIFPPSDEQLKSGTASVVCLLNNFYPREAKVQW | |
| | | KVDNALQSGNSQESVTEQDSKDSTYSLSSTLTLSKADYEKHKVYACEVT | |
| | | HQGLSSPVTKSFNRGEC | |
| Ly1986 | 1^{st} | QVQLVQSGAEVKKPGASVKVSCKASGYTFTSYVMHWVRQKPGQGLEWIG | 362 |
| | chain | YINPYNEGTESTDKFKGRATMTSDKSTSTVYMELSSLRSEDTAVYYCAS | |
| | | IYYGYEGTYFGVWGQGTLVTVSSASTKGPSVFPLAPSSKSTSGGTAALG | |
| | | CLVKDYFPEPVTVSWNSGALTSGVHTFPAVLQSSGLYSLSSVVTVPSSS | |
| | | LGTQTYICNVNHKPSNTKVDKKVEPKSCGGGGSGGGGSGGGGSGGGGSE | |
| | | VQLVESGGGLVQPGGSLRLSCAASGFTFSTYAMNWVRQAPGKGLEWVGR | |
| | | IRSKYNNYATYYADSVKGRFTISRDDSKNSLYLQMNSLKTEDTAVYYCV | |
| | | RHGNFGNSYVSWFAYWGQGTLVTVSSPAPEAAGPSVFLFPPKPKDTLMI | |
| | | SRTPEVTCVVVDVSHEDPEVKFNWYVDGVEVHNAKTKPREEQYNSTYRV | |
| | | VSVLTVLHQDWLNGKEYKCKVSNKALPAPIEKTISKAKGQPREPQVYTL | |
| | | PPSREEMTKNQVSLWCLVKGFYPSDIAVEWESNGQPENNYKTTPPVLDS | |
| | | DGSFFLYSKLTVDKSRWQQGNVFSCSVMHEALHNHYTQKSLSLSPGK | |
| | 2^{nd} | QVQLVQSGAEVKKPGASVKVSCKASGYTFTSYVMHWVRQKPGQGLEWIG | 363 |
| | chain | YINPYNEGTESTDKFKGRATMTSDKSTSTVYMELSSLRSEDTAVYYCAS | |
| | | IYYGYEGTYFGVWGQGTLVTVSSASTKGPSVFPLAPSSKSTSGGTAALG | |
| | | CLVKDYFPEPVTVSWNSGALTSGVHTFPAVLQSSGLYSLSSVVTVPSSS | |
| | | LGTQTYICNVNHKPSNTKVDKKVEPKSCGGGGSGGGGSGGGGSGGGGSQ | |
| | | AVVTQEPSLTVSPGGTVTLTCRSSTGAVTTSNYANWVQQKPGQAPRGLI | |
| | | GGTNKRAPWTPARFSGSLLGGKAALTITGAQAEDEADYYCALWYSNLWV | |
| | | FGGGTKLTVLPAPEAAGPSVFLFPPKPKDTLMISRTPEVTCVVVDVSHE | |
| | | DPEVKFNWYVDGVEVHNAKTKPREEQYNSTYRVVSVLTVLHQDWLNGKE | |
| | | YKCKVSNKALPAPIEKTISKAKGQPREPQVYTLPPSREEMTKNQVSLSC | |
| | | AVKGFYPSDIAVEWESNGQPENNYKTTPPVLDSDGSFFLVSKLTVDKSR | |
| | | WQQGNVFSCSVMHEALHNRFTQKSLSLSPGGGGGSGGGGSGGGGSGGGG | |
| | | SDIQMTQSPSSLSASVGDRVTITCQASQNIYVWLNWYQQKPGKAPKLLI | |
| | | YKASNLHTGVPSRFSGSGSGTDFTLTISSLQPEDIATYYCQQGQTYPYT | |
| | | FGQGTKLEIKGGGGSGGGGSGGGGSGGGGSQVQLVQSGAEVVKPGASVK | |
| | | VSCKASGYTFTSYYIHWVRQAPGQGLEWIGSIYPGNVNTNYAQKFQGRA | |
| | | TLTVDTSISTAYMELSRLRSDDTAVYYCTRSHYGLDWNFDVWGKGTTVT | |
| | | VSS | |
| | 3^{rd} | EIVLTQSPATLSLSPGERATLSCRASSSVSYMHWYQQKPGQAPRPWIYA | 364 |
| | chain | TSNLASGIPARFSGSRSGTDYTLTISSLEPEDFAVYYCQQWSSNTLTFG | |
| | | GGTKVEIKRTVAAPSVFIFPPSDEQLKSGTASVVCLLNNFYPREAKVQW | |
| | | KVDNALQSGNSQESVTEQDSKDSTYSLSSTLTLSKADYEKHKVYACEVT | |
| | | HQGLSSPVTKSFNRGEC | |
| Ly1987 | 1^{st} | QVQLVQSGAEVKKPGASVKVSCKASGYTFTSYVMHWVRQKPGQGLEWIG | 365 |
| | chain | YINPYNEGTESTDKFKGRATMTSDKSTSTVYMELSSLRSEDTAVYYCAS | |
| | | IYYGYEGTYFGVWGQGTLVTVSSASTKGPSVFPLAPSSKSTSGGTAALG | |
| | | CLVKDYFPEPVTVSWNSGALTSGVHTFPAVLQSSGLYSLSSVVTVPSSS | |
| | | LGTQTYICNVNHKPSNTKVDKKVEPKSCGGGGSGGGGSGGGGSGGGGSE | |
| | | VQLVESGGGLVQPGGSLRLSCAASGFTFSTYAMNWVRQAPGKGLEWVGR | |
| | | IRSKYNNYATYYADSVKGRFTISRDDSKNSLYLQMNSLKTEDTAVYYCV | |
| | | RHGNFGNSYVSWFAYWGQGTLVTVSSPAPEAAGPSVFLFPPKPKDTLMI | |
| | | SRTPEVTCVVVDVSHEDPEVKFNWYVDGVEVHNAKTKPREEQYNSTYRV | |
| | | VSVLTVLHQDWLNGKEYKCKVSNKALPAPIEKTISKAKGQPREPQVYTL | |
| | | PPSREEMTKNQVSLWCLVKGFYPSDIAVEWESNGQPENNYKTTPPVLDS | |
| | | DGSFFLYSKLTVDKSRWQQGNVFSCSVMHEALHNHYTQKSLSLSPGK | |
| | 2^{nd} | QVQLVQSGAEVKKPGASVKVSCKASGYTFTSYVMHWVRQKPGQGLEWIG | 366 |
| | chain | YINPYNEGTESTDKFKGRATMTSDKSTSTVYMELSSLRSEDTAVYYCAS | |
| | | IYYGYEGTYFGVWGQGTLVTVSSASTKGPSVFPLAPSSKSTSGGTAALG | |
| | | CLVKDYFPEPVTVSWNSGALTSGVHTFPAVLQSSGLYSLSSVVTVPSSS | |
| | | LGTQTYICNVNHKPSNTKVDKKVEPKSCGGGGSGGGGSGGGGSGGGGSQ | |
| | | AVVTQEPSLTVSPGGTVTLTCRSSTGAVTTSNYANWVQQKPGQAPRGLI | |
| | | GGTNKRAPWTPARFSGSLLGGKAALTITGAQAEDEADYYCALWYSNLWV | |
| | | FGGGTKLTVLPAPEAAGPSVFLFPPKPKDTLMISRTPEVTCVVVDVSHE | |
| | | DPEVKFNWYVDGVEVHNAKTKPREEQYNSTYRVVSVLTVLHQDWLNGKE | |
| | | YKCKVSNKALPAPIEKTISKAKGQPREPQVYTLPPSREEMTKNQVSLSC | |
| | | AVKGFYPSDIAVEWESNGQPENNYKTTPPVLDSDGSFFLVSKLTVDKSR | |
| | | WQQGNVFSCSVMHEALHNRFTQKSLSLSPGGGGGSGGGGSGGGGSGGGG | |
| | | SQVQLVQSGAEVVKPGASVKVSCKASGYTFTSYYIHWVRQAPGQGLEWI | |
| | | GSIYPGNVNTNYAQKFQGRATLTVDTSISTAYMELSRLRSDDTAVYYCT | |
| | | RSHYGLDWNFDVWGKGTTVTVSSGGGGSGGGGSGGGGSGGGGSDIQMTQ | |
| | | SPSSLSASVGDRVTITCQASQNIYVWLNWYQQKPGKAPKLLIYKASNLH | |
| | | TGVPSRFSGSGSGTDFTLTISSLQPEDIATYYCQQGQTYPYTFGQGTKL | |
| | | EIK | |
| | 3^{rd} | EIVLTQSPATLSLSPGERATLSCRASSSVSYMHWYQQKPGQAPRPWIYA | 367 |
| | chain | TSNLASGIPARFSGSRSGTDYTLTISSLEPEDFAVYYCQQWSSNTLTFG | |
| | | GGTKVEIKRTVAAPSVFIFPPSDEQLKSGTASVVCLLNNFYPREAKVQW | |
| | | KVDNALQSGNSQESVTEQDSKDSTYSLSSTLTLSKADYEKHKVYACEVT | |
| | | HQGLSSPVTKSFNRGEC | |
| Ly1988 | 1^{st} | QVQLVQSGAEVKKPGASVKVSCKASGYTFTSYVMHWVRQKPGQGLEWIG | 368 |
| | chain | YINPYNEGTESTDKFKGRATMTSDKSTSTVYMELSSLRSEDTAVYYCAS | |
| | | IYYGYEGTYFGVWGQGTLVTVSSASTKGPSVFPLAPSSKSTSGGTAALG | |
| | | CLVKDYFPEPVTVSWNSGALTSGVHTFPAVLQSSGLYSLSSVVTVPSSS | |
| | | LGTQTYICNVNHKPSNTKVDKKVEPKSCGGGGSGGGGSGGGGSGGGGSE | |
| | | VQLVESGGGLVQPGGSLRLSCAASGFTFSTYAMNWVRQAPGKGLEWVGR | |
| | | IRSKYNNYATYYADSVKGRFTISRDDSKNSLYLQMNSLKTEDTAVYYCV | |
| | | RHGNFGNSYVSWFAYWGQGTLVTVSSPAPEAAGPSVFLFPPKPKDTLMI | |
| | | SRTPEVTCVVVDVSHEDPEVKFNWYVDGVEVHNAKTKPREEQYNSTYRV | |
| | | VSVLTVLHQDWLNGKEYKCKVSNKALPAPIEKTISKAKGQPREPQVYTL | |
| | | PPSREEMTKNQVSLWCLVKGFYPSDIAVEWESNGQPENNYKTTPPVLDS | |
| | | DGSFFLYSKLTVDKSRWQQGNVFSCSVMHEALHNHYTQKSLSLSPGGGG | |
| | | GSGGGGSGGGGSGGGGSQVQLVQSGAEVVKPGASVKVSCKASGYTFTSY | |
| | | YIHWVRQAPGQGLEWIGSIYPGNVNTNYAQKFQGRATLTVDTSISTAYM | |
| | | ELSRLRSDDTAVYYCTRSHYGLDWNFDVWGKGTTVTVSS | |
| | 2^{nd} | QVQLVQSGAEVKKPGASVKVSCKASGYTFTSYVMHWVRQKPGQGLEWIG | 369 |
| | chain | YINPYNEGTESTDKFKGRATMTSDKSTSTVYMELSSLRSEDTAVYYCAS | |
| | | IYYGYEGTYFGVWGQGTLVTVSSASTKGPSVFPLAPSSKSTSGGTAALG | |
| | | CLVKDYFPEPVTVSWNSGALTSGVHTFPAVLQSSGLYSLSSVVTVPSSS | |
| | | LGTQTYICNVNHKPSNTKVDKKVEPKSCGGGGSGGGGSGGGGSGGGGSQ | |
| | | AVVTQEPSLTVSPGGTVTLTCRSSTGAVTTSNYANWVQQKPGQAPRGLI | |
| | | GGTNKRAPWTPARFSGSLLGGKAALTITGAQAEDEADYYCALWYSNLWV | |
| | | FGGGTKLTVLPAPEAAGPSVFLFPPKPKDTLMISRTPEVTCVVVDVSHE | |
| | | DPEVKFNWYVDGVEVHNAKTKPREEQYNSTYRVVSVLTVLHQDWLNGKE | |
| | | YKCKVSNKALPAPIEKTISKAKGQPREPQVYTLPPSREEMTKNQVSLSC | |
| | | AVKGFYPSDIAVEWESNGQPENNYKTTPPVLDSDGSFFLVSKLTVDKSR | |
| | | WQQGNVFSCSVMHEALHNRFTQKSLSLSPGGGGGSGGGGSGGGGSGGGG | |
| | | SDIQMTQSPSSLSASVGDRVTITCQASQNIYVWLNWYQQKPGKAPKLLI | |
| | | YKASNLHTGVPSRFSGSGSGTDFTLTISSLQPEDIATYYCQQGQTYPYT | |
| | | FGQGTKLEIK | |
| | 3^{rd} | EIVLTQSPATLSLSPGERATLSCRASSSVSYMHWYQQKPGQAPRPWIYA | 370 |
| | chain | TSNLASGIPARFSGSRSGTDYTLTISSLEPEDFAVYYCQQWSSNTLTFG | |
| | | GGTKVEIKRTVAAPSVFIFPPSDEQLKSGTASVVCLLNNFYPREAKVQW | |
| | | KVDNALQSGNSQESVTEQDSKDSTYSLSSTLTLSKADYEKHKVYACEVT | |
| | | HQGLSSPVTKSFNRGEC | |
| Ly1989 | 1^{st} | QVQLVQSGAEVKKPGASVKVSCKASGYTFTSYVMHWVRQKPGQGLEWIG | 371 |
| | chain | YINPYNEGTESTDKFKGRATMTSDKSTSTVYMELSSLRSEDTAVYYCAS | |
| | | IYYGYEGTYFGVWGQGTLVTVSSASTKGPSVFPLAPSSKSTSGGTAALG | |
| | | CLVKDYFPEPVTVSWNSGALTSGVHTFPAVLQSSGLYSLSSVVTVPSSS | |
| | | LGTQTYICNVNHKPSNTKVDKKVEPKSCGGGGSGGGGSGGGGSGGGGSE | |
| | | VQLVESGGGLVQPGGSLRLSCAASGFTFSTYAMNWVRQAPGKGLEWVGR | |
| | | IRSKYNNYATYYADSVKGRFTISRDDSKNSLYLQMNSLKTEDTAVYYCV | |
| | | RHGNFGNSYVSWFAYWGQGTLVTVSSPAPEAAGPSVFLFPPKPKDTLMI | |
| | | SRTPEVTCVVVDVSHEDPEVKFNWYVDGVEVHNAKTKPREEQYNSTYRV | |
| | | VSVLTVLHQDWLNGKEYKCKVSNKALPAPIEKTISKAKGQPREPQVYTL | |
| | | PPSREEMTKNQVSLWCLVKGFYPSDIAVEWESNGQPENNYKTTPPVLDS | |
| | | DGSFFLYSKLTVDKSRWQQGNVFSCSVMHEALHNHYTQKSLSLSPGK | |
| | 2^{nd} | QVQLVQSGAEVKKPGASVKVSCKASGYTFTSYVMHWVRQKPGQGLEWIG | 372 |
| | chain | YINPYNEGTESTDKFKGRATMTSDKSTSTVYMELSSLRSEDTAVYYCAS | |
| | | IYYGYEGTYFGVWGQGTLVTVSSASTKGPSVFPLAPSSKSTSGGTAALG | |
| | | CLVKDYFPEPVTVSWNSGALTSGVHTFPAVLQSSGLYSLSSVVTVPSSS | |
| | | LGTQTYICNVNHKPSNTKVDKKVEPKSCGGGGSGGGGSGGGGSGGGGSQ | |
| | | AVVTQEPSLTVSPGGTVTLTCRSSTGAVTTSNYANWVQQKPGQAPRGLI | |
| | | GGTNKRAPWTPARFSGSLLGGKAALTITGAQAEDEADYYCALWYSNLWV | |
| | | FGGGTKLTVLPAPEAAGPSVFLFPPKPKDTLMISRTPEVTCVVVDVSHE | |
| | | DPEVKFNWYVDGVEVHNAKTKPREEQYNSTYRVVSVLTVLHQDWLNGKE | |
| | | YKCKVSNKALPAPIEKTISKAKGQPREPQVYTLPPSREEMTKNQVSLSC | |
| | | AVKGFYPSDIAVEWESNGQPENNYKTTPPVLDSDGSFFLVSKLTVDKSR | |
| | | WQQGNVFSCSVMHEALHNRFTQKSLSLSPGK | |
| | 3^{rd} | EIVLTQSPATLSLSPGERATLSCRASSSVSYMHWYQQKPGQAPRPWIYA | 373 |
| | chain | TSNLASGIPARFSGSRSGTDYTLTISSLEPEDFAVYYCQQWSSNTLTFG | |
| | | GGTKVEIKRTVAAPSVFIFPPSDEQLKSGTASVVCLLNNFYPREAKVQW | |
| | | KVDNALQSGNSQESVTEQDSKDSTYSLSSTLTLSKADYEKHKVYACEVT | |
| | | HQGLSSPVTKSFNRGECGGGGSGGGGSGGGGSGGGGSDIQMTQSPSSLS | |
| | | ASVGDRVTITCQASQNIYVWLNWYQQKPGKAPKLLIYKASNLHTGVPSR | |
| | | FSGSGSGTDFTLTISSLQPEDIATYYCQQGQTYPYTFGQGTKLEIKGGG | |
| | | GSGGGGSGGGGSGGGGSQVQLVQSGAEVVKPGASVKVSCKASGYTFTSY | |
| | | YIHWVRQAPGQGLEWIGSIYPGNVNTNYAQKFQGRATLTVDTSISTAYM | |
| | | ELSRLRSDDTAVYYCTRSHYGLDWNFDVWGKGTTVTVSS | |
| Ly1990 | 1^{st} | QVQLVQSGAEVKKPGASVKVSCKASGYTFTSYVMHWVRQKPGQGLEWIG | 374 |
| | chain | YINPYNEGTESTDKFKGRATMTSDKSTSTVYMELSSLRSEDTAVYYCAS | |
| | | IYYGYEGTYFGVWGQGTLVTVSSASTKGPSVFPLAPSSKSTSGGTAALG | |
| | | CLVKDYFPEPVTVSWNSGALTSGVHTFPAVLQSSGLYSLSSVVTVPSSS | |
| | | LGTQTYICNVNHKPSNTKVDKKVEPKSCGGGGSGGGGSGGGGSGGGGSE | |
| | | VQLVESGGGLVQPGGSLRLSCAASGFTFSTYAMNWVRQAPGKGLEWVGR | |
| | | IRSKYNNYATYYADSVKGRFTISRDDSKNSLYLQMNSLKTEDTAVYYCV | |
| | | RHGNFGNSYVSWFAYWGQGTLVTVSSPAPEAAGPSVFLFPPKPKDTLMI | |
| | | SRTPEVTCVVVDVSHEDPEVKFNWYVDGVEVHNAKTKPREEQYNSTYRV | |
| | | VSVLTVLHQDWLNGKEYKCKVSNKALPAPIEKTISKAKGQPREPQVYTL | |
| | | PPSREEMTKNQVSLWCLVKGFYPSDIAVEWESNGQPENNYKTTPPVLDS | |
| | | DGSFFLYSKLTVDKSRWQQGNVFSCSVMHEALHNHYTQKSLSLSPGK | |
| | 2^{nd} | QVQLVQSGAEVKKPGASVKVSCKASGYTFTSYVMHWVRQKPGQGLEWIG | 375 |
| | chain | YINPYNEGTESTDKFKGRATMTSDKSTSTVYMELSSLRSEDTAVYYCAS | |
| | | IYYGYEGTYFGVWGQGTLVTVSSASTKGPSVFPLAPSSKSTSGGTAALG | |
| | | CLVKDYFPEPVTVSWNSGALTSGVHTFPAVLQSSGLYSLSSVVTVPSSS | |
| | | LGTQTYICNVNHKPSNTKVDKKVEPKSCGGGGSGGGGSGGGGSGGGGSQ | |
| | | AVVTQEPSLTVSPGGTVTLTCRSSTGAVTTSNYANWVQQKPGQAPRGLI | |
| | | GGTNKRAPWTPARFSGSLLGGKAALTITGAQAEDEADYYCALWYSNLWV | |
| | | FGGGTKLTVLPAPEAAGPSVFLFPPKPKDTLMISRTPEVTCVVVDVSHE | |
| | | DPEVKFNWYVDGVEVHNAKTKPREEQYNSTYRVVSVLTVLHQDWLNGKE | |
| | | YKCKVSNKALPAPIEKTISKAKGQPREPQVYTLPPSREEMTKNQVSLSC | |
| | | AVKGFYPSDIAVEWESNGQPENNYKTTPPVLDSDGSFFLVSKLTVDKSR | |
| | | WQQGNVFSCSVMHEALHNRFTQKSLSLSPGK | |
| | 3^{rd} | EIVLTQSPATLSLSPGERATLSCRASSSVSYMHWYQQKPGQAPRPWIYA | 376 |
| | chain | TSNLASGIPARFSGSRSGTDYTLTISSLEPEDFAVYYCQQWSSNTLTFG | |
| | | GGTKVEIKRTVAAPSVFIFPPSDEQLKSGTASVVCLLNNFYPREAKVQW | |
| | | KVDNALQSGNSQESVTEQDSKDSTYSLSSTLTLSKADYEKHKVYACEVT | |
| | | HQGLSSPVTKSFNRGECGGGGSGGGGSGGGGSGGGGSQVQLVQSGAEVV | |
| | | KPGASVKVSCKASGYTFTSYYIHWVRQAPGQGLEWIGSIYPGNVNTNYA | |
| | | QKFQGRATLTVDTSISTAYMELSRLRSDDTAVYYCTRSHYGLDWNFDVW | |
| | | GKGTTVTVSSGGGGSGGGGSGGGGSGGGGSDIQMTQSPSSLSASVGDRV | |
| | | TITCQASQNIYVWLNWYQQKPGKAPKLLIYKASNLHTGVPSRFSGSGSG | |
| | | TDFTLTISSLQPEDIATYYCQQGQTYPYTFGQGTKLEIK | |
| Ly1991 | 1^{st} | QVQLVQSGAEVKKPGASVKVSCKASGYTFTSYVMHWVRQKPGQGLEWIG | 377 |
| | chain | YINPYNEGTESTDKFKGRATMTSDKSTSTVYMELSSLRSEDTAVYYCAS | |
| | | IYYGYEGTYFGVWGQGTLVTVSSASTKGPSVFPLAPSSKSTSGGTAALG | |
| | | CLVKDYFPEPVTVSWNSGALTSGVHTFPAVLQSSGLYSLSSVVTVPSSS | |
| | | LGTQTYICNVNHKPSNTKVDKKVEPKSCDKTHTCPPCPAPEAAGPSVFL | |
| | | FPPKPKDTLMISRTPEVTCVVVDVSHEDPEVKFNWYVDGVEVHNAKTKP | |
| | | REEQYNSTYRVVSVLTVLHQDWLNGKEYKCKVSNKALPAPIEKTISKAK | |
| | | GQPREPQVYTLPPSREEMTKNQVSLWCLVKGFYPSDIAVEWESNGQPEN | |
| | | NYKTTPPVLDSDGSFFLYSKLTVDKSRWQQGNVFSCSVMHEALHNHYTQ | |
| | | KSLSLSPGGGGGSGGGGSGGGGSGGGGSDIQMTQSPSSLSASVGDRVTI | |
| | | TCQASQNIYVWLNWYQQKPGKAPKLLIYKASNLHTGVPSRFSGSGSGTD | |
| | | FTLTISSLQPEDIATYYCQQGQTYPYTFGQGTKLEIKGGGGSGGGGSGG | |
| | | GGSGGGGSQVQLVQSGAEVVKPGASVKVSCKASGYTFTSYYIHWVRQAP | |
| | | GQGLEWIGSIYPGNVNTNYAQKFQGRATLTVDTSISTAYMELSRLRSDD | |
| | | TAVYYCTRSHYGLDWNFDVWGKGTTVTVSS | |
| | 2^{nd} | QVQLVQSGAEVKKPGASVKVSCKASGYTFTSYVMHWVRQKPGQGLEWIG | 378 |
| | chain | YINPYNEGTESTDKFKGRATMTSDKSTSTVYMELSSLRSEDTAVYYCAS | |
| | | IYYGYEGTYFGVWGQGTLVTVSSASTKGPSVFPLAPSSKSTSGGTAALG | |
| | | CLVKDYFPEPVTVSWNSGALTSGVHTFPAVLQSSGLYSLSSVVTVPSSS | |
| | | LGTQTYICNVNHKPSNTKVDKKVEPKSCDKTHTCPPCPAPEAAGPSVFL | |
| | | FPPKPKDTLMISRTPEVTCVVVDVSHEDPEVKFNWYVDGVEVHNAKTKP | |
| | | REEQYNSTYRVVSVLTVLHQDWLNGKEYKCKVSNKALPAPIEKTISKAK | |
| | | GQPREPQVYTLPPSREEMTKNQVSLSCAVKGFYPSDIAVEWESNGQPEN | |
| | | NYKTTPPVLDSDGSFFLVSKLTVDKSRWQQGNVFSCSVMHEALHNRFTQ | |
| | | KSLSLSPGGGGGSGGGGSGGGGSGGGGSDIQMTQSPSTLSASVGDRVTI | |
| | | TCSASSSVSYMNWYQQKPGKAPKLLIYDTSKLASGVPSRFSGSGSGTEF | |
| | | TLTISSLQPDDFATYYCQQWSSNPFTFGQGTKLEIKGGGGSGGGGSGGG | |
| | | GSGGGGSQVQLVQSGAEVKKPGASVKVSCKASGYTFTRYTMHWVRQAPG | |
| | | QGLEWMGYINPSRGYTNYNQKFKDRVTMTRDTSTSTVYMELSSLRSEDT | |
| | | AVYYCARYYDDHYCLDYWGQGTLVTVSS | |
| | 3^{rd} | EIVLTQSPATLSLSPGERATLSCRASSSVSYMHWYQQKPGQAPRPWIYA | 379 |
| | chain | TSNLASGIPARFSGSRSGTDYTLTISSLEPEDFAVYYCQQWSSNTLTFG | |
| | | GGTKVEIKRTVAAPSVFIFPPSDEQLKSGTASVVCLLNNFYPREAKVQW | |
| | | KVDNALQSGNSQESVTEQDSKDSTYSLSSTLTLSKADYEKHKVYACEVT | |
| | | HQGLSSPVTKSFNRGEC | |
| Ly1992 | 1^{st} | QVQLVQSGAEVKKPGASVKVSCKASGYTFTSYVMHWVRQKPGQGLEWIG | 380 |
| | chain | YINPYNEGTESTDKFKGRATMTSDKSTSTVYMELSSLRSEDTAVYYCAS | |
| | | IYYGYEGTYFGVWGQGTLVTVSSASTKGPSVFPLAPSSKSTSGGTAALG | |
| | | CLVKDYFPEPVTVSWNSGALTSGVHTFPAVLQSSGLYSLSSVVTVPSSS | |
| | | LGTQTYICNVNHKPSNTKVDKKVEPKSCDKTHTCPPCPAPEAAGPSVFL | |
| | | FPPKPKDTLMISRTPEVTCVVVDVSHEDPEVKFNWYVDGVEVHNAKTKP | |
| | | REEQYNSTYRVVSVLTVLHQDWLNGKEYKCKVSNKALPAPIEKTISKAK | |
| | | GQPREPQVYTLPPSREEMTKNQVSLWCLVKGFYPSDIAVEWESNGQPEN | |
| | | NYKTTPPVLDSDGSFFLYSKLTVDKSRWQQGNVFSCSVMHEALHNHYTQ | |
| | | KSLSLSPGGGGGSGGGGSGGGGSGGGGSQVQLVQSGAEVVKPGASVKVS | |
| | | CKASGYTFTSYYIHWVRQAPGQGLEWIGSIYPGNVNTNYAQKFQGRATL | |
| | | TVDTSISTAYMELSRLRSDDTAVYYCTRSHYGLDWNFDVWGKGTTVTVS | |
| | | SGGGGSGGGGSGGGGSGGGGSDIQMTQSPSSLSASVGDRVTITCQASQN | |
| | | IYVWLNWYQQKPGKAPKLLIYKASNLHTGVPSRFSGSGSGTDFTLTISS | |
| | | LQPEDIATYYCQQGQTYPYTFGQGTKLEIK | |
| | 2^{nd} | QVQLVQSGAEVKKPGASVKVSCKASGYTFTSYVMHWVRQKPGQGLEWIG | 381 |
| | chain | YINPYNEGTESTDKFKGRATMTSDKSTSTVYMELSSLRSEDTAVYYCAS | |
| | | IYYGYEGTYFGVWGQGTLVTVSSASTKGPSVFPLAPSSKSTSGGTAALG | |
| | | CLVKDYFPEPVTVSWNSGALTSGVHTFPAVLQSSGLYSLSSVVTVPSSS | |
| | | LGTQTYICNVNHKPSNTKVDKKVEPKSCDKTHTCPPCPAPEAAGPSVFL | |
| | | FPPKPKDTLMISRTPEVTCVVVDVSHEDPEVKFNWYVDGVEVHNAKTKP | |
| | | REEQYNSTYRVVSVLTVLHQDWLNGKEYKCKVSNKALPAPIEKTISKAK | |
| | | GQPREPQVYTLPPSREEMTKNQVSLSCAVKGFYPSDIAVEWESNGQPEN | |
| | | NYKTTPPVLDSDGSFFLVSKLTVDKSRWQQGNVFSCSVMHEALHNRFTQ | |
| | | KSLSLSPGGGGGSGGGGSGGGGSGGGGSDIQMTQSPSTLSASVGDRVTI | |
| | | TCSASSSVSYMNWYQQKPGKAPKLLIYDTSKLASGVPSRFSGSGSGTEF | |
| | | TLTISSLQPDDFATYYCQQWSSNPFTFGQGTKLEIKGGGGSGGGGSGGG | |
| | | GSGGGGSQVQLVQSGAEVKKPGASVKVSCKASGYTFTRYTMHWVRQAPG | |
| | | QGLEWMGYINPSRGYTNYNQKFKDRVTMTRDTSTSTVYMELSSLRSEDT | |
| | | AVYYCARYYDDHYCLDYWGQGTLVTVSS | |
| | 3^{rd} | EIVLTQSPATLSLSPGERATLSCRASSSVSYMHWYQQKPGQAPRPWIYA | 382 |
| | chain | TSNLASGIPARFSGSRSGTDYTLTISSLEPEDFAVYYCQQWSSNTLTFG | |
| | | GGTKVEIKRTVAAPSVFIFPPSDEQLKSGTASVVCLLNNFYPREAKVQW | |
| | | KVDNALQSGNSQESVTEQDSKDSTYSLSSTLTLSKADYEKHKVYACEVT | |
| | | HQGLSSPVTKSFNRGEC | |
| Ly1993 | 1^{st} | QVQLVQSGAEVKKPGASVKVSCKASGYTFTSYVMHWVRQKPGQGLEWIG | 383 |
| | chain | YINPYNEGTESTDKFKGRATMTSDKSTSTVYMELSSLRSEDTAVYYCAS | |
| | | IYYGYEGTYFGVWGQGTLVTVSSASTKGPSVFPLAPSSKSTSGGTAALG | |
| | | CLVKDYFPEPVTVSWNSGALTSGVHTFPAVLQSSGLYSLSSVVTVPSSS | |
| | | LGTQTYICNVNHKPSNTKVDKKVEPKSCGGGGSGGGGSGGGGSGGGGSE | |
| | | VQLVESGGGLVQPGGSLRLSCAASGFTFSTYAMNWVRQAPGKGLEWVGR | |
| | | IRSKYNNYATYYADSVKGRFTISRDDSKNSLYLQMNSLKTEDTAVYYCV | |
| | | RHGNFGNSYVSWFAYWGQGTLVTVSSPAPELLGPSVFLFPPKPKDTLMI | |
| | | SRTPEVTCVVVDVSHEDPEVKFNWYVDGVEVHNAKTKPREEQYNSTYRV | |
| | | VSVLTVLHQDWLNGKEYKCKVSNKALPAPIEKTISKAKGQPREPQVYTL | |
| | | PPSREEMTKNQVSLWCLVKGFYPSDIAVEWESNGQPENNYKTTPPVLDS | |
| | | DGSFFLYSKLTVDKSRWQQGNVFSCSVMHEALHNHYTQKSLSLSPGK | |
| | 2^{nd} | QVQLVQSGAEVKKPGASVKVSCKASGYTFTSYYIHWVRQAPGQGLEWIG | 384 |
| | chain | CIYPGNVNTNYNEKFKDRATLTVDTSISTAYMELSRLRSDDTAVYFCTR | |
| | | SHYGLDWNFDVWGQGTTVTVSSASVAAPSVFIFPPSDEQLKSGTASVVC | |
| | | LLNNFYPREAKVQWKVDNALQSGNSQESVTEQDSKDSTYSLSSTLTLSK | |
| | | ADYEKHKVYACEVTHQGLSSPVTKSFNRGECGGGGSGGGGSGGGGSGGG | |
| | | GSQAVVTQEPSLTVSPGGTVTLTCRSSTGAVTTSNYANWVQQKPGQAPR | |
| | | GLIGGTNKRAPWTPARFSGSLLGGKAALTITGAQAEDEADYYCALWYSN | |
| | | LWVFGGGTKLTVLPAPELLGPSVFLFPPKPKDTLMISRTPEVTCVVVDV | |
| | | SHEDPEVKFNWYVDGVEVHNAKTKPREEQYNSTYRVVSVLTVLHQDWLN | |
| | | GKEYKCKVSNKALPAPIEKTISKAKGQPREPQVYTLPPSREEMTKNQVS | |
| | | LSCAVKGFYPSDIAVEWESNGQPENNYKTTPPVLDSDGSFFLVSKLTVD | |
| | | KSRWQQGNVFSCSVMHEALHNRFTQKSLSLSPGK | |
| | 3^{rd} | EIVLTQSPATLSLSPGERATLSCRASSSVSYMHWYQQKPGQAPRPWIYA | 385 |
| | chain | TSNLASGIPARFSGSRSGTDYTLTISSLEPEDFAVYYCQQWSSNTLTFG | |
| | | GGTKVEIKRTVAAPSVFIFPPSDEQLKSGTASVVCLLNNFYPREAKVQW | |
| | | KVDNALQSGNSQESVTEQDSKDSTYSLSSTLTLSKADYEKHKVYACEVT | |
| | | HQGLSSPVTKSFNRGEC | |
| | 4^{th} | DIQMTQSPSSLSASVGDRVTITCHASQNIYVWLNWYQQKPGKAPKLLIY | 386 |
| | chain | KASNLHTGVPSRFSGSGSGTDFTLTISSLQPEDFATYYCQQGQTYPYTF | |
| | | GGGTKVEIKSSASTKGPSVFPLAPSSKSTSGGTAALGCLVKDYFPEPVT | |
| | | VSWNSGALTSGVHTFPAVLQSSGLYSLSSVVTVPSSSLGTQTYICNVNH | |
| | | KPSNTKVDKKVEPKSC | |
| Ly1994 | 1^{st} | QVQLVQSGAEVKKPGASVKVSCKASGYTFTSYVMHWVRQKPGQGLEWIG | 387 |
| | chain | YINPYNEGTESTDKFKGRATMTSDKSTSTVYMELSSLRSEDTAVYYCAS | |
| | | IYYGYEGTYFGVWGQGTLVTVSSASTKGPSVFPLAPSSKSTSGGTAALG | |
| | | CLVKDYFPEPVTVSWNSGALTSGVHTFPAVLQSSGLYSLSSVVTVPSSS | |
| | | LGTQTYICNVNHKPSNTKVDKKVEPKSCDKTHTCPPCPAPEAAGPSVFL | |
| | | FPPKPKDTLMISRTPEVTCVVVDVSHEDPEVKFNWYVDGVEVHNAKTKP | |
| | | REEQYNSTYRVVSVLTVLHQDWLNGKEYKCKVSNKALPAPIEKTISKAK | |
| | | GQPREPQVYTLPPSREEMTKNQVSLWCLVKGFYPSDIAVEWESNGQPEN | |
| | | NYKTTPPVLDSDGSFFLYSKLTVDKSRWQQGNVFSCSVMHEALHNHYTQ | |
| | | KSLSLSPGGGGGSGGGGSGGGGSGGGGSDIQMTQSPSSLSASVGDRVTI | |
| | | TCHASQNIYVWLNWYQQKPGKAPKLLIYKASNLHTGVPSRFSGSGSGTD | |
| | | FTLTISSLQPEDFATYYCQQGQTYPYTFGGGTKVEIKGGGGSGGGGSGG | |
| | | GGSGGGGSQVQLVQSGAEVKKPGASVKVSCKASGYTFTSYYIHWVRQAP | |
| | | GQGLEWIGCIYPGNVNTNYNEKFKDRATLTVDTSISTAYMELSRLRSDD | |
| | | TAVYFCTRSHYGLDWNFDVWGQGTTVTVSS | |
| | 2^{nd} | QVQLVQSGAEVKKPGASVKVSCKASGYTFTSYVMHWVRQKPGQGLEWIG | 388 |
| | chain | YINPYNEGTESTDKFKGRATMTSDKSTSTVYMELSSLRSEDTAVYYCAS | |
| | | IYYGYEGTYFGVWGQGTLVTVSSASTKGPSVFPLAPSSKSTSGGTAALG | |
| | | CLVKDYFPEPVTVSWNSGALTSGVHTFPAVLQSSGLYSLSSVVTVPSSS | |
| | | LGTQTYICNVNHKPSNTKVDKKVEPKSCGGGGSGGGGSGGGGSGGGGSE | |
| | | VQLVESGGGLVQPGGSLRLSCAASGFTFSTYAMNWVRQAPGKGLEWVGR | |
| | | IRSKYNNYATYYADSVKGRFTISRDDSKNSLYLQMNSLKTEDTAVYYCV | |
| | | RHGNFGNSYVSWFAYWGQGTLVTVSSASVAAPSVFIFPPSDEQLKSGTA | |
| | | SVVCLLNNFYPREAKVQWKVDNALQSGNSQESVTEQDSKDSTYSLSSTL | |
| | | TLSKADYEKHKVYACEVTHQGLSSPVTKSFNRGECDKTHTCPPCPAPEA | |
| | | AGPSVFLFPPKPKDTLMISRTPEVTCVVVDVSHEDPEVKFNWYVDGVEV | |
| | | HNAKTKPREEQYNSTYRVVSVLTVLHQDWLNGKEYKCKVSNKALPAPIE | |
| | | KTISKAKGQPREPQVYTLPPSREEMTKNQVSLSCAVKGFYPSDIAVEWE | |
| | | SNGQPENNYKTTPPVLDSDGSFFLVSKLTVDKSRWQQGNVFSCSVMHEA | |
| | | LHNRFTQKSLSLSPGGGGGSGGGGSGGGGSGGGGSDIQMTQSPSSLSAS | |
| | | VGDRVTITCHASQNIYVWLNWYQQKPGKAPKLLIYKASNLHTGVPSRFS | |
| | | GSGSGTDFTLTISSLQPEDFATYYCQQGQTYPYTFGGGTKVEIKGGGGS | |
| | | GGGGSGGGGSGGGGSQVQLVQSGAEVKKPGASVKVSCKASGYTFTSYYI | |
| | | HWVRQAPGQGLEWIGCIYPGNVNTNYNEKFKDRATLTVDTSISTAYMEL | |
| | | SRLRSDDTAVYFCTRSHYGLDWNFDVWGQGTTVTVSS | |
| | 3^{rd} | EIVLTQSPATLSLSPGERATLSCRASSSVSYMHWYQQKPGQAPRPWIYA | 389 |
| | chain | TSNLASGIPARFSGSRSGTDYTLTISSLEPEDFAVYYCQQWSSNTLTFG | |
| | | GGTKVEIKRTVAAPSVFIFPPSDEQLKSGTASVVCLLNNFYPREAKVQW | |
| | | KVDNALQSGNSQESVTEQDSKDSTYSLSSTLTLSKADYEKHKVYACEVT | |
| | | HQGLSSPVTKSFNRGEC | |
| | 4^{th} | QAVVTQEPSLTVSPGGTVTLTCRSSTGAVTTSNYANWVQQKPGQAPRGL | 390 |
| | chain | IGGTNKRAPWTPARFSGSLLGGKAALTITGAQAEDEADYYCALWYSNLW | |
| | | VFGGGTKLTVLSSASTKGPSVFPLAPSSKSTSGGTAALGCLVKDYFPEP | |
| | | VTVSWNSGALTSGVHTFPAVLQSSGLYSLSSVVTVPSSSLGTQTYICNV | |
| | | NHKPSNTKVDKKVEPKSC | |
| Ly1995 | 1^{st} | QVQLVQSGAEVKKPGASVKVSCKASGYTFTSYVMHWVRQKPGQGLEWIG | 391 |
| | chain | YINPYNEGTESTDKFKGRATMTSDKSTSTVYMELSSLRSEDTAVYYCAS | |
| | | IYYGYEGTYFGVWGQGTLVTVSSASTKGPSVFPLAPSSKSTSGGTAALG | |
| | | CLVKDYFPEPVTVSWNSGALTSGVHTFPAVLQSSGLYSLSSVVTVPSSS | |
| | | LGTQTYICNVNHKPSNTKVDKKVEPKSCDKTHTCPPCPAPEAAGPSVFL | |
| | | FPPKPKDTLMISRTPEVTCVVVDVSHEDPEVKFNWYVDGVEVHNAKTKP | |
| | | REEQYNSTYRVVSVLTVLHQDWLNGKEYKCKVSNKALPAPIEKTISKAK | |
| | | GQPREPQVYTLPPSREEMTKNQVSLWCLVKGFYPSDIAVEWESNGQPEN | |
| | | NYKTTPPVLDSDGSFFLYSKLTVDKSRWQQGNVFSCSVMHEALHNHYTQ | |
| | | KSLSLSPGGGGGSGGGGSGGGGSGGGGSQVQLVQSGAEVKKPGASVKVS | |
| | | CKASGYTFTSYYIHWVRQAPGQGLEWIGCIYPGNVNTNYNEKFKDRATL | |
| | | TVDTSISTAYMELSRLRSDDTAVYFCTRSHYGLDWNFDVWGQGTTVTVS | |
| | | SGGGGSGGGGSGGGGSGGGGSDIQMTQSPSSLSASVGDRVTITCHASQN | |
| | | IYVWLNWYQQKPGKAPKLLIYKASNLHTGVPSRFSGSGSGTDFTLTISS | |
| | | LQPEDFATYYCQQGQTYPYTFGGGTKVEIK | |
| | 2^{nd} | QVQLVQSGAEVKKPGASVKVSCKASGYTFTSYVMHWVRQKPGQGLEWIG | 392 |
| | chain | YINPYNEGTESTDKFKGRATMTSDKSTSTVYMELSSLRSEDTAVYYCAS | |
| | | IYYGYEGTYFGVWGQGTLVTVSSASTKGPSVFPLAPSSKSTSGGTAALG | |
| | | CLVKDYFPEPVTVSWNSGALTSGVHTFPAVLQSSGLYSLSSVVTVPSSS | |
| | | LGTQTYICNVNHKPSNTKVDKKVEPKSCGGGGSGGGGSGGGGSGGGGSE | |
| | | VQLVESGGGLVQPGGSLRLSCAASGFTFSTYAMNWVRQAPGKGLEWVGR | |
| | | IRSKYNNYATYYADSVKGRFTISRDDSKNSLYLQMNSLKTEDTAVYYCV | |
| | | RHGNFGNSYVSWFAYWGQGTLVTVSSASVAAPSVFIFPPSDEQLKSGTA | |
| | | SVVCLLNNFYPREAKVQWKVDNALQSGNSQESVTEQDSKDSTYSLSSTL | |
| | | TLSKADYEKHKVYACEVTHQGLSSPVTKSFNRGECDKTHTCPPCPAPEA | |
| | | AGPSVFLFPPKPKDTLMISRTPEVTCVVVDVSHEDPEVKFNWYVDGVEV | |
| | | HNAKTKPREEQYNSTYRVVSVLTVLHQDWLNGKEYKCKVSNKALPAPIE | |
| | | KTISKAKGQPREPQVYTLPPSREEMTKNQVSLSCAVKGFYPSDIAVEWE | |
| | | SNGQPENNYKTTPPVLDSDGSFFLVSKLTVDKSRWQQGNVFSCSVMHEA | |
| | | LHNRFTQKSLSLSPGGGGGSGGGGSGGGGSGGGGSQVQLVQSGAEVKKP | |
| | | GASVKVSCKASGYTFTSYYIHWVRQAPGQGLEWIGCIYPGNVNTNYNEK | |
| | | FKDRATLTVDTSISTAYMELSRLRSDDTAVYFCTRSHYGLDWNEDVWGQ | |
| | | GTTVTVSSGGGGSGGGGSGGGGSGGGGSDIQMTQSPSSLSASVGDRVTI | |
| | | TCHASQNIYVWLNWYQQKPGKAPKLLIYKASNLHTGVPSRFSGSGSGTD | |
| | | FTLTISSLQPEDFATYYCQQGQTYPYTFGGGTKVEIK | |
| | 3^{rd} | EIVLTQSPATLSLSPGERATLSCRASSSVSYMHWYQQKPGQAPRPWIYA | 393 |
| | chain | TSNLASGIPARFSGSRSGTDYTLTISSLEPEDFAVYYCQQWSSNTLTFG | |
| | | GGTKVEIKRTVAAPSVFIFPPSDEQLKSGTASVVCLLNNFYPREAKVQW | |
| | | KVDNALQSGNSQESVTEQDSKDSTYSLSSTLTLSKADYEKHKVYACEVT | |
| | | HQGLSSPVTKSFNRGEC | |
| | 4^{th} | QAVVTQEPSLTVSPGGTVTLTCRSSTGAVTTSNYANWVQQKPGQAPRGL | 394 |
| | chain | IGGTNKRAPWTPARFSGSLLGGKAALTITGAQAEDEADYYCALWYSNLW | |
| | | VFGGGTKLTVLSSASTKGPSVFPLAPSSKSTSGGTAALGCLVKDYFPEP | |
| | | VTVSWNSGALTSGVHTFPAVLQSSGLYSLSSVVTVPSSSLGTQTYICNV | |
| | | NHKPSNTKVDKKVEPKSC | |
| Ly1996 | 1^{st} | QVQLVQSGAEVKKPGASVKVSCKASGYTFTSYVMHWVRQKPGQGLEWIG | 395 |
| | chain | YINPYNEGTESTDKFKGRATMTSDKSTSTVYMELSSLRSEDTAVYYCAS | |
| | | IYYGYEGTYFGVWGQGTLVTVSSASTKGPSVFPLAPSSKSTSGGTAALG | |
| | | CLVKDYFPEPVTVSWNSGALTSGVHTFPAVLQSSGLYSLSSVVTVPSSS | |
| | | LGTQTYICNVNHKPSNTKVDKKVEPKSCDKTHTCPPCPAPEAAGPSVFL | |
| | | FPPKPKDTLMISRTPEVTCVVVDVSHEDPEVKFNWYVDGVEVHNAKTKP | |
| | | REEQYNSTYRVVSVLTVLHQDWLNGKEYKCKVSNKALPAPIEKTISKAK | |
| | | GQPREPQVYTLPPSREEMTKNQVSLWCLVKGFYPSDIAVEWESNGQPEN | |
| | | NYKTTPPVLDSDGSFFLYSKLTVDKSRWQQGNVFSCSVMHEALHNHYTQ | |
| | | KSLSLSPGK | |
| | 2^{nd} | QVQLVQSGAEVKKPGASVKVSCKASGYTFTSYVMHWVRQKPGQGLEWIG | 396 |
| | chain | YINPYNEGTESTDKFKGRATMTSDKSTSTVYMELSSLRSEDTAVYYCAS | |
| | | IYYGYEGTYFGVWGQGTLVTVSSASTKGPSVFPLAPSSKSTSGGTAALG | |
| | | CLVKDYFPEPVTVSWNSGALTSGVHTFPAVLQSSGLYSLSSVVTVPSSS | |
| | | LGTQTYICNVNHKPSNTKVDKKVEPKSCGGGGSGGGGSGGGGSGGGGSE | |
| | | VQLVESGGGLVQPGGSLRLSCAASGFTFSTYAMNWVRQAPGKGLEWVGR | |
| | | IRSKYNNYATYYADSVKGRFTISRDDSKNSLYLQMNSLKTEDTAVYYCV | |
| | | RHGNFGNSYVSWFAYWGQGTLVTVSSASVAAPSVFIFPPSDEQLKSGTA | |
| | | SVVCLLNNFYPREAKVQWKVDNALQSGNSQESVTEQDSKDSTYSLSSTL | |
| | | TLSKADYEKHKVYACEVTHQGLSSPVTKSFNRGECDKTHTCPPCPAPEA | |
| | | AGPSVFLFPPKPKDTLMISRTPEVTCVVVDVSHEDPEVKFNWYVDGVEV | |
| | | HNAKTKPREEQYNSTYRVVSVLTVLHQDWLNGKEYKCKVSNKALPAPIE | |
| | | KTISKAKGQPREPQVYTLPPSREEMTKNQVSLSCAVKGFYPSDIAVEWE | |
| | | SNGQPENNYKTTPPVLDSDGSFFLVSKLTVDKSRWQQGNVFSCSVMHEA | |
| | | LHNRFTQKSLSLSPGGGGGSGGGGSGGGGSGGGGSDIQMTQSPSSLSAS | |
| | | VGDRVTITCHASQNIYVWLNWYQQKPGKAPKLLIYKASNLHTGVPSRFS | |
| | | GSGSGTDFTLTISSLQPEDFATYYCQQGQTYPYTFGGGTKVEIKGGGGS | |
| | | GGGGSGGGGSGGGGSQVQLVQSGAEVKKPGASVKVSCKASGYTFTSYYI | |
| | | HWVRQAPGQGLEWIGCIYPGNVNTNYNEKFKDRATLTVDTSISTAYMEL | |
| | | SRLRSDDTAVYFCTRSHYGLDWNFDVWGQGTTVTVSS | |
| | 3^{rd} | EIVLTQSPATLSLSPGERATLSCRASSSVSYMHWYQQKPGQAPRPWIYA | 397 |
| | chain | TSNLASGIPARFSGSRSGTDYTLTISSLEPEDFAVYYCQQWSSNTLTFG | |
| | | GGTKVEIKRTVAAPSVFIFPPSDEQLKSGTASVVCLLNNFYPREAKVQW | |
| | | KVDNALQSGNSQESVTEQDSKDSTYSLSSTLTLSKADYEKHKVYACEVT | |
| | | HQGLSSPVTKSFNRGEC | |
| | 4^{th} | QAVVTQEPSLTVSPGGTVTLTCRSSTGAVTTSNYANWVQQKPGQAPRGL | 398 |
| | chain | IGGTNKRAPWTPARFSGSLLGGKAALTITGAQAEDEADYYCALWYSNLW | |
| | | VFGGGTKLTVLSSASTKGPSVFPLAPSSKSTSGGTAALGCLVKDYFPEP | |
| | | VTVSWNSGALTSGVHTFPAVLQSSGLYSLSSVVTVPSSSLGTQTYICNV | |
| | | NHKPSNTKVDKKVEPKSC | |
| Ly1997 | 1^{st} | QVQLVQSGAEVKKPGASVKVSCKASGYTFTSYVMHWVRQKPGQGLEWIG | 399 |
| | chain | YINPYNEGTESTDKFKGRATMTSDKSTSTVYMELSSLRSEDTAVYYCAS | |
| | | IYYGYEGTYFGVWGQGTLVTVSSASTKGPSVFPLAPSSKSTSGGTAALG | |
| | | CLVKDYFPEPVTVSWNSGALTSGVHTFPAVLQSSGLYSLSSVVTVPSSS | |
| | | LGTQTYICNVNHKPSNTKVDKKVEPKSCDKTHTCPPCPAPEAAGPSVFL | |
| | | FPPKPKDTLMISRTPEVTCVVVDVSHEDPEVKFNWYVDGVEVHNAKTKP | |
| | | REEQYNSTYRVVSVLTVLHQDWLNGKEYKCKVSNKALPAPIEKTISKAK | |
| | | GQPREPQVYTLPPSREEMTKNQVSLWCLVKGFYPSDIAVEWESNGQPEN | |
| | | NYKTTPPVLDSDGSFFLYSKLTVDKSRWQQGNVFSCSVMHEALHNHYTQ | |
| | | KSLSLSPGK | |
| | 2^{nd} | QVQLVQSGAEVKKPGASVKVSCKASGYTFTSYVMHWVRQKPGQGLEWIG | 400 |
| | chain | YINPYNEGTESTDKFKGRATMTSDKSTSTVYMELSSLRSEDTAVYYCAS | |
| | | IYYGYEGTYFGVWGQGTLVTVSSASTKGPSVFPLAPSSKSTSGGTAALG | |
| | | CLVKDYFPEPVTVSWNSGALTSGVHTFPAVLQSSGLYSLSSVVTVPSSS | |
| | | LGTQTYICNVNHKPSNTKVDKKVEPKSCGGGGSGGGGSGGGGSGGGGSE | |
| | | VQLVESGGGLVQPGGSLRLSCAASGFTFSTYAMNWVRQAPGKGLEWVGR | |
| | | IRSKYNNYATYYADSVKGRFTISRDDSKNSLYLQMNSLKTEDTAVYYCV | |
| | | RHGNFGNSYVSWFAYWGQGTLVTVSSASVAAPSVFIFPPSDEQLKSGTA | |
| | | SVVCLLNNFYPREAKVQWKVDNALQSGNSQESVTEQDSKDSTYSLSSTL | |
| | | TLSKADYEKHKVYACEVTHQGLSSPVTKSFNRGECDKTHTCPPCPAPEA | |
| | | AGPSVFLFPPKPKDTLMISRTPEVTCVVVDVSHEDPEVKFNWYVDGVEV | |
| | | HNAKTKPREEQYNSTYRVVSVLTVLHQDWLNGKEYKCKVSNKALPAPIE | |
| | | KTISKAKGQPREPQVYTLPPSREEMTKNQVSLSCAVKGFYPSDIAVEWE | |
| | | SNGQPENNYKTTPPVLDSDGSFFLVSKLTVDKSRWQQGNVFSCSVMHEA | |
| | | LHNRFTQKSLSLSPGGGGGSGGGGSGGGGSGGGGSQVQLVQSGAEVKKP | |
| | | GASVKVSCKASGYTFTSYYIHWVRQAPGQGLEWIGCIYPGNVNTNYNEK | |
| | | FKDRATLTVDTSISTAYMELSRLRSDDTAVYFCTRSHYGLDWNFDVWGQ | |
| | | GTTVTVSSGGGGSGGGGSGGGGSGGGGSDIQMTQSPSSLSASVGDRVTI | |
| | | TCHASQNIYVWLNWYQQKPGKAPKLLIYKASNLHTGVPSRFSGSGSGTD | |
| | | FTLTISSLQPEDFATYYCQQGQTYPYTFGGGTKVEIK | |
| | 3^{rd} | EIVLTQSPATLSLSPGERATLSCRASSSVSYMHWYQQKPGQAPRPWIYA | 401 |
| | chain | TSNLASGIPARFSGSRSGTDYTLTISSLEPEDFAVYYCQQWSSNTLTFG | |
| | | GGTKVEIKRTVAAPSVFIFPPSDEQLKSGTASVVCLLNNFYPREAKVQW | |
| | | KVDNALQSGNSQESVTEQDSKDSTYSLSSTLTLSKADYEKHKVYACEVT | |
| | | HQGLSSPVTKSFNRGEC | |
| | 4^{th} | QAVVTQEPSLTVSPGGTVTLTCRSSTGAVTTSNYANWVQQKPGQAPRGL | 402 |
| | chain | IGGTNKRAPWTPARFSGSLLGGKAALTITGAQAEDEADYYCALWYSNLW | |
| | | VFGGGTKLTVLSSASTKGPSVFPLAPSSKSTSGGTAALGCLVKDYFPEP | |
| | | VTVSWNSGALTSGVHTFPAVLQSSGLYSLSSVVTVPSSSLGTQTYICNV | |
| | | NHKPSNTKVDKKVEPKSC | |
| Ly1998 | 1^{st} | QAVVTQEPSLTVSPGGTVTLTCRSSTGAVTTSNYANWVQQKPGQAPRGL | 403 |
| | chain | IGGTNKRAPWTPARFSGSLLGGKAALTITGAQAEDEADYYCALWYSNLW | |
| | | VFGGGTKLTVLSSASTKGPSVFPLAPSSKSTSGGTAALGCLVKDYFPEP | |
| | | VTVSWNSGALTSGVHTFPAVLQSSGLYSLSSVVTVPSSSLGTQTYICNV | |
| | | NHKPSNTKVDKKVEPKSC | |
| | | QVQLVQSGAEVKKPGASVKVSCKASGYTFTSYVMHWVRQKPGQGLEWIG | |
| | | YINPYNEGTESTDKFKGRATMTSDKSTSTVYMELSSLRSEDTAVYYCAS | |
| | | IYYGYEGTYFGVWGQGTLVTVSSASTKGPSVFPLAPSSKSTSGGTAALG | |
| | | CLVKDYFPEPVTVSWNSGALTSGVHTFPAVLQSSGLYSLSSVVTVPSSS | |
| | | LGTQTYICNVNHKPSNTKVDKKVEPKSCDKTHTCPPCPAPEAAGPSVFL | |
| | | FPPKPKDTLMISRTPEVTCVVVDVSHEDPEVKFNWYVDGVEVHNAKTKP | |
| | | REEQYNSTYRVVSVLTVLHQDWLNGKEYKCKVSNKALPAPIEKTISKAK | |
| | | GQPREPQVYTLPPSREEMTKNQVSLWCLVKGFYPSDIAVEWESNGQPEN | |
| | | NYKTTPPVLDSDGSFFLYSKLTVDKSRWQQGNVFSCSVMHEALHNHYTQ | |
| | | KSLSLSPGGGGGSGGGGSGGGGSGGGGSDIQMTQSPSSLSASVGDRVTI | |
| | | TCHASQNIYVWLNWYQQKPGKAPKLLIYKASNLHTGVPSRFSGSGSGTD | |
| | | FTLTISSLQPEDFATYYCQQGQTYPYTFGGGTKVEIKGGGGSGGGGSGG | |
| | | GGSGGGGSQVQLVQSGAEVKKPGASVKVSCKASGYTFTSYYIHWVRQAP | |
| | | GQGLEWIGCIYPGNVNTNYNEKFKDRATLTVDTSISTAYMELSRLRSDD | |
| | | TAVYFCTRSHYGLDWNFDVWGQGTTVTVSS | |
| | 2^{nd} | QVQLVQSGAEVKKPGASVKVSCKASGYTFTSYVMHWVRQKPGQGLEWIG | 404 |
| | chain | YINPYNEGTESTDKFKGRATMTSDKSTSTVYMELSSLRSEDTAVYYCAS | |
| | | IYYGYEGTYFGVWGQGTLVTVSSASTKGPSVFPLAPSSKSTSGGTAALG | |
| | | CLVKDYFPEPVTVSWNSGALTSGVHTFPAVLQSSGLYSLSSVVTVPSSS | |
| | | LGTQTYICNVNHKPSNTKVDKKVEPKSCGGGGSGGGGSGGGGSGGGGSE | |
| | | VQLVESGGGLVQPGGSLRLSCAASGFTFSTYAMNWVRQAPGKGLEWVGR | |
| | | IRSKYNNYATYYADSVKGRFTISRDDSKNSLYLQMNSLKTEDTAVYYCV | |
| | | RHGNFGNSYVSWFAYWGQGTLVTVSSASVAAPSVFIFPPSDEQLKSGTA | |
| | | SVVCLLNNFYPREAKVQWKVDNALQSGNSQESVTEQDSKDSTYSLSSTL | |
| | | TLSKADYEKHKVYACEVTHQGLSSPVTKSFNRGECDKTHTCPPCPAPEA | |
| | | AGPSVFLFPPKPKDTLMISRTPEVTCVVVDVSHEDPEVKFNWYVDGVEV | |
| | | HNAKTKPREEQYNSTYRVVSVLTVLHQDWLNGKEYKCKVSNKALPAPIE | |
| | | KTISKAKGQPREPQVYTLPPSREEMTKNQVSLSCAVKGFYPSDIAVEWE | |
| | | SNGQPENNYKTTPPVLDSDGSFFLVSKLTVDKSRWQQGNVFSCSVMHEA | |
| | | LHNRFTQKSLSLSPGK | |
| | 3^{rd} | EIVLTQSPATLSLSPGERATLSCRASSSVSYMHWYQQKPGQAPRPWIYA | 405 |
| | chain | TSNLASGIPARFSGSRSGTDYTLTISSLEPEDFAVYYCQQWSSNTLTFG | |
| | | GGTKVEIKRTVAAPSVFIFPPSDEQLKSGTASVVCLLNNFYPREAKVQW | |
| | | KVDNALQSGNSQESVTEQDSKDSTYSLSSTLTLSKADYEKHKVYACEVT | |
| | | HQGLSSPVTKSFNRGEC | |
| | 4^{th} | QAVVTQEPSLTVSPGGTVTLTCRSSTGAVTTSNYANWVQQKPGQAPRGL | 406 |
| | chain | IGGTNKRAPWTPARFSGSLLGGKAALTITGAQAEDEADYYCALWYSNLW | |
| | | VFGGGTKLTVLSSASTKGPSVFPLAPSSKSTSGGTAALGCLVKDYFPEP | |
| | | VTVSWNSGALTSGVHTFPAVLQSSGLYSLSSVVTVPSSSLGTQTYICNV | |
| | | NHKPSNTKVDKKVEPKSC | |
| Ly1999 | 1^{st} | QVQLVQSGAEVKKPGASVKVSCKASGYTFTSYVMHWVRQKPGQGLEWIG | 407 |
| | chain | YINPYNEGTESTDKFKGRATMTSDKSTSTVYMELSSLRSEDTAVYYCAS | |
| | | IYYGYEGTYFGVWGQGTLVTVSSASTKGPSVFPLAPSSKSTSGGTAALG | |
| | | CLVKDYFPEPVTVSWNSGALTSGVHTFPAVLQSSGLYSLSSVVTVPSSS | |
| | | LGTQTYICNVNHKPSNTKVDKKVEPKSCDKTHTCPPCPAPEAAGPSVFL | |
| | | FPPKPKDTLMISRTPEVTCVVVDVSHEDPEVKFNWYVDGVEVHNAKTKP | |
| | | REEQYNSTYRVVSVLTVLHQDWLNGKEYKCKVSNKALPAPIEKTISKAK | |
| | | GQPREPQVYTLPPSREEMTKNQVSLWCLVKGFYPSDIAVEWESNGQPEN | |
| | | NYKTTPPVLDSDGSFFLYSKLTVDKSRWQQGNVFSCSVMHEALHNHYTQ | |
| | | KSLSLSPGGGGGSGGGGSGGGGSGGGGSQVQLVQSGAEVKKPGASVKVS | |
| | | CKASGYTFTSYYIHWVRQAPGQGLEWIGCIYPGNVNTNYNEKFKDRATL | |
| | | TVDTSISTAYMELSRLRSDDTAVYFCTRSHYGLDWNFDVWGQGTTVTVS | |
| | | SGGGGSGGGGGGGGSGGGGSDIQMTQSPSSLSASVGDRVTITCHASQN | |
| | | IYVWLNWYQQKPGKAPKLLIYKASNLHTGVPSRFSGSGSGTDFTLTISS | |
| | | LQPEDFATYYCQQGQTYPYTFGGGTKVEIK | |
| | 2^{nd} | QVQLVQSGAEVKKPGASVKVSCKASGYTFTSYVMHWVRQKPGQGLEWIG | 408 |
| | chain | YINPYNEGTESTDKFKGRATMTSDKSTSTVYMELSSLRSEDTAVYYCAS | |
| | | IYYGYEGTYFGVWGQGTLVTVSSASTKGPSVFPLAPSSKSTSGGTAALG | |
| | | CLVKDYFPEPVTVSWNSGALTSGVHTFPAVLQSSGLYSLSSVVTVPSSS | |
| | | LGTQTYICNVNHKPSNTKVDKKVEPKSCGGGGSGGGGSGGGGSGGGGSE | |
| | | VQLVESGGGLVQPGGSLRLSCAASGFTFSTYAMNWVRQAPGKGLEWVGR | |
| | | IRSKYNNYATYYADSVKGRFTISRDDSKNSLYLQMNSLKTEDTAVYYCV | |
| | | RHGNFGNSYVSWFAYWGQGTLVTVSSASVAAPSVFIFPPSDEQLKSGTA | |
| | | SVVCLLNNFYPREAKVQWKVDNALQSGNSQESVTEQDSKDSTYSLSSTL | |
| | | TLSKADYEKHKVYACEVTHQGLSSPVTKSFNRGECDKTHTCPPCPAPEA | |
| | | AGPSVFLFPPKPKDTLMISRTPEVTCVVVDVSHEDPEVKFNWYVDGVEV | |
| | | HNAKTKPREEQYNSTYRVVSVLTVLHQDWLNGKEYKCKVSNKALPAPIE | |
| | | KTISKAKGQPREPQVYTLPPSREEMTKNQVSLSCAVKGFYPSDIAVEWE | |
| | | SNGQPENNYKTTPPVLDSDGSFFLVSKLTVDKSRWQQGNVFSCSVMHEA | |
| | | LHNRFTQKSLSLSPGK | |
| | 3^{rd} | EIVLTQSPATLSLSPGERATLSCRASSSVSYMHWYQQKPGQAPRPWIYA | 409 |
| | chain | TSNLASGIPARFSGSRSGTDYTLTISSLEPEDFAVYYCQQWSSNTLTFG | |
| | | GGTKVEIKRTVAAPSVFIFPPSDEQLKSGTASVVCLLNNFYPREAKVQW | |
| | | KVDNALQSGNSQESVTEQDSKDSTYSLSSTLTLSKADYEKHKVYACEVT | |
| | | HQGLSSPVTKSFNRGEC | |
| | 4^{th} | QAVVTQEPSLTVSPGGTVTLTCRSSTGAVTTSNYANWVQQKPGQAPRGL | 410 |
| | chain | IGGTNKRAPWTPARFSGSLLGGKAALTITGAQAEDEADYYCALWYSNLW | |
| | | VFGGGTKLTVLSSASTKGPSVFPLAPSSKSTSGGTAALGCLVKDYFPEP | |
| | | VTVSWNSGALTSGVHTFPAVLQSSGLYSLSSVVTVPSSSLGTQTYICNV | |
| | | NHKPSNTKVDKKVEPKSC | |
| Ly2000 | 1^{st} | QVQLVQSGAEVKKPGASVKVSCKASGYTFTSYVMHWVRQKPGQGLEWIG | 411 |
| | chain | YINPYNEGTESTDKFKGRATMTSDKSTSTVYMELSSLRSEDTAVYYCAS | |
| | | IYYGYEGTYFGVWGQGTLVTVSSASTKGPSVFPLAPSSKSTSGGTAALG | |
| | | CLVKDYFPEPVTVSWNSGALTSGVHTFPAVLQSSGLYSLSSVVTVPSSS | |
| | | LGTQTYICNVNHKPSNTKVDKKVEPKSCDKTHTCPPCPAPEAAGPSVFL | |
| | | FPPKPKDTLMISRTPEVTCVVVDVSHEDPEVKFNWYVDGVEVHNAKTKP | |
| | | REEQYNSTYRVVSVLTVLHQDWLNGKEYKCKVSNKALPAPIEKTISKAK | |
| | | GQPREPQVYTLPPSREEMTKNQVSLWCLVKGFYPSDIAVEWESNGQPEN | |
| | | NYKTTPPVLDSDGSFFLYSKLTVDKSRWQQGNVFSCSVMHEALHNHYTQ | |
| | | KSLSLSPGGGGGSGGGGSGGGGSGGGGSQVQLVQSGAEVKKPGASVKVS | |
| | | CKASGYTFTSYYIHWVRQAPGQGLEWIGCIYPGNVNTNYNEKFKDRATL | |
| | | TVDTSISTAYMELSRLRSDDTAVYFCTRSHYGLDWNEDVWGQGTTVTVS | |
| | | S | |
| | 2^{nd} | QVQLVQSGAEVKKPGASVKVSCKASGYTFTSYVMHWVRQKPGQGLEWIG | 412 |
| | chain | YINPYNEGTESTDKFKGRATMTSDKSTSTVYMELSSLRSEDTAVYYCAS | |
| | | IYYGYEGTYFGVWGQGTLVTVSSASTKGPSVFPLAPSSKSTSGGTAALG | |
| | | CLVKDYFPEPVTVSWNSGALTSGVHTFPAVLQSSGLYSLSSVVTVPSSS | |
| | | LGTQTYICNVNHKPSNTKVDKKVEPKSCGGGGSGGGGSGGGGSGGGGSE | |
| | | VQLVESGGGLVQPGGSLRLSCAASGFTFSTYAMNWVRQAPGKGLEWVGR | |
| | | IRSKYNNYATYYADSVKGRFTISRDDSKNSLYLQMNSLKTEDTAVYYCV | |
| | | RHGNFGNSYVSWFAYWGQGTLVTVSSASVAAPSVFIFPPSDEQLKSGTA | |
| | | SVVCLLNNFYPREAKVQWKVDNALQSGNSQESVTEQDSKDSTYSLSSTL | |
| | | TLSKADYEKHKVYACEVTHQGLSSPVTKSFNRGECDKTHTCPPCPAPEA | |
| | | AGPSVFLFPPKPKDTLMISRTPEVTCVVVDVSHEDPEVKFNWYVDGVEV | |
| | | HNAKTKPREEQYNSTYRVVSVLTVLHQDWLNGKEYKCKVSNKALPAPIE | |
| | | KTISKAKGQPREPQVYTLPPSREEMTKNQVSLSCAVKGFYPSDIAVEWE | |
| | | SNGQPENNYKTTPPVLDSDGSFFLVSKLTVDKSRWQQGNVFSCSVMHEA | |
| | | LHNRFTQKSLSLSPGGGGGSGGGGSGGGGSGGGGSDIQMTQSPSSLSAS | |
| | | VGDRVTITCHASQNIYVWLNWYQQKPGKAPKLLIYKASNLHTGVPSRFS | |
| | | GSGSGTDFTLTISSLQPEDFATYYCQQGQTYPYTFGGGTKVEIK | |
| | 3^{rd} | EIVLTQSPATLSLSPGERATLSCRASSSVSYMHWYQQKPGQAPRPWIYA | 413 |
| | chain | TSNLASGIPARFSGSRSGTDYTLTISSLEPEDFAVYYCQQWSSNTLTFG | |
| | | GGTKVEIKRTVAAPSVFIFPPSDEQLKSGTASVVCLLNNFYPREAKVQW | |
| | | KVDNALQSGNSQESVTEQDSKDSTYSLSSTLTLSKADYEKHKVYACEVT | |
| | | HQGLSSPVTKSFNRGEC | |
| | 4^{th} | QAVVTQEPSLTVSPGGTVTLTCRSSTGAVTTSNYANWVQQKPGQAPRGL | 414 |
| | chain | IGGTNKRAPWTPARFSGSLLGGKAALTITGAQAEDEADYYCALWYSNLW | |
| | | VFGGGTKLTVLSSASTKGPSVFPLAPSSKSTSGGTAALGCLVKDYFPEP | |
| | | VTVSWNSGALTSGVHTFPAVLQSSGLYSLSSVVTVPSSSLGTQTYICNV | |
| | | NHKPSNTKVDKKVEPKSC | |
| Ly2001 | 1^{st} | QVQLVQSGAEVKKPGASVKVSCKASGYTFTSYVMHWVRQKPGQGLEWIG | 415 |
| | chain | YINPYNEGTESTDKFKGRATMTSDKSTSTVYMELSSLRSEDTAVYYCAS | |
| | | IYYGYEGTYFGVWGQGTLVTVSSASTKGPSVFPLAPSSKSTSGGTAALG | |
| | | CLVKDYFPEPVTVSWNSGALTSGVHTFPAVLQSSGLYSLSSVVTVPSSS | |
| | | LGTQTYICNVNHKPSNTKVDKKVEPKSCDKTHTCPPCPAPEAAGPSVFL | |
| | | FPPKPKDTLMISRTPEVTCVVVDVSHEDPEVKFNWYVDGVEVHNAKTKP | |
| | | REEQYNSTYRVVSVLTVLHQDWLNGKEYKCKVSNKALPAPIEKTISKAK | |
| | | GQPREPQVYTLPPSREEMTKNQVSLWCLVKGFYPSDIAVEWESNGQPEN | |
| | | NYKTTPPVLDSDGSFFLYSKLTVDKSRWQQGNVFSCSVMHEALHNHYTQ | |
| | | KSLSLSPGGGGGSGGGGSGGGGSGGGGSDIQMTQSPSSLSASVGDRVTI | |
| | | TCHASQNIYVWLNWYQQKPGKAPKLLIYKASNLHTGVPSRFSGSGSGTD | |
| | | FTLTISSLQPEDFATYYCQQGQTYPYTFGGGTKVEIKGGGGSGGGGSGG | |
| | | GGSGGGGSQVQLVQSGAEVKKPGASVKVSCKASGYTFTSYYIHWVRQAP | |
| | | GQGLEWIGCIYPGNVNTNYNEKFKDRATLTVDTSISTAYMELSRLRSDD | |
| | | TAVYFCTRSHYGLDWNFDVWGQGTTVTVSS | |
| | 2^{nd} | QVQLVQSGAEVKKPGASVKVSCKASGYTFTSYVMHWVRQKPGQGLEWIG | 416 |
| | chain | YINPYNEGTESTDKFKGRATMTSDKSTSTVYMELSSLRSEDTAVYYCAS | |
| | | IYYGYEGTYFGVWGQGTLVTVSSASTKGPSVFPLAPSSKSTSGGTAALG | |
| | | CLVKDYFPEPVTVSWNSGALTSGVHTFPAVLQSSGLYSLSSVVTVPSSS | |
| | | LGTQTYICNVNHKPSNTKVDKKVEPKSCGGGGSGGGGSGGGGSGGGGSQ | |
| | | AVVTQEPSLTVSPGGTVTLTCRSSTGAVTTSNYANWVQQKPGQAPRGLI | |
| | | GGTNKRAPWTPARFSGSLLGGKAALTITGAQAEDEADYYCALWYSNLWV | |
| | | FGGGTKLTVLGGGGSGGGGSGGGGSGGGGSEVQLVESGGGLVQPGGSLR | |
| | | LSCAASGFTFSTYAMNWVRQAPGKGLEWVGRIRSKYNNYATYYADSVKG | |
| | | RFTISRDDSKNSLYLQMNSLKTEDTAVYYCVRHGNFGNSYVSWFAYWGQ | |
| | | GTLVTVSSDKTHTCPPCPAPEAAGPSVFLFPPKPKDTLMISRTPEVTCV | |
| | | VVDVSHEDPEVKFNWYVDGVEVHNAKTKPREEQYNSTYRVVSVLTVLHQ | |
| | | DWLNGKEYKCKVSNKALPAPIEKTISKAKGQPREPQVYTLPPSREEMTK | |
| | | NQVSLSCAVKGFYPSDIAVEWESNGQPENNYKTTPPVLDSDGSFFLVSK | |
| | | LTVDKSRWQQGNVFSCSVMHEALHNRFTQKSLSLSPGK | |
| | 3^{rd} | EIVLTQSPATLSLSPGERATLSCRASSSVSYMHWYQQKPGQAPRPWIYA | 417 |
| | chain | TSNLASGIPARFSGSRSGTDYTLTISSLEPEDFAVYYCQQWSSNTLTFG | |
| | | GGTKVEIKRTVAAPSVFIFPPSDEQLKSGTASVVCLLNNFYPREAKVQW | |
| | | KVDNALQSGNSQESVTEQDSKDSTYSLSSTLTLSKADYEKHKVYACEVT | |
| | | HQGLSSPVTKSFNRGEC | |
| Ly2002 | 1^{st} | QVQLVQSGAEVKKPGASVKVSCKASGYTFTSYVMHWVRQKPGQGLEWIG | 418 |
| | chain | YINPYNEGTESTDKFKGRATMTSDKSTSTVYMELSSLRSEDTAVYYCAS | |
| | | IYYGYEGTYFGVWGQGTLVTVSSASTKGPSVFPLAPSSKSTSGGTAALG | |
| | | CLVKDYFPEPVTVSWNSGALTSGVHTFPAVLQSSGLYSLSSVVTVPSSS | |
| | | LGTQTYICNVNHKPSNTKVDKKVEPKSCDKTHTCPPCPAPEAAGPSVFL | |
| | | FPPKPKDTLMISRTPEVTCVVVDVSHEDPEVKFNWYVDGVEVHNAKTKP | |
| | | REEQYNSTYRVVSVLTVLHQDWLNGKEYKCKVSNKALPAPIEKTISKAK | |
| | | GQPREPQVYTLPPSREEMTKNQVSLWCLVKGFYPSDIAVEWESNGQPEN | |
| | | NYKTTPPVLDSDGSFFLYSKLTVDKSRWQQGNVFSCSVMHEALHNHYTQ | |
| | | KSLSLSPGGGGGSGGGGSGGGGSGGGGSQVQLVQSGAEVKKPGASVKVS | |
| | | CKASGYTFTSYYIHWVRQAPGQGLEWIGCIYPGNVNTNYNEKFKDRATL | |
| | | TVDTSISTAYMELSRLRSDDTAVYFCTRSHYGLDWNFDVWGQGTTVTVS | |
| | | SGGGGSGGGGSGGGGSGGGGSDIQMTQSPSSLSASVGDRVTITCHASQN | |
| | | IYVWLNWYQQKPGKAPKLLIYKASNLHTGVPSRFSGSGSGTDFTLTISS | |
| | | LQPEDFATYYCQQGQTYPYTFGGGTKVEIK | |
| | 2^{nd} | QVQLVQSGAEVKKPGASVKVSCKASGYTFTSYVMHWVRQKPGQGLEWIG | 419 |
| | chain | YINPYNEGTESTDKFKGRATMTSDKSTSTVYMELSSLRSEDTAVYYCAS | |
| | | IYYGYEGTYFGVWGQGTLVTVSSASTKGPSVFPLAPSSKSTSGGTAALG | |
| | | CLVKDYFPEPVTVSWNSGALTSGVHTFPAVLQSSGLYSLSSVVTVPSSS | |
| | | LGTQTYICNVNHKPSNTKVDKKVEPKSCGGGGSGGGGSGGGGSGGGGSQ | |
| | | AVVTQEPSLTVSPGGTVTLTCRSSTGAVTTSNYANWVQQKPGQAPRGLI | |
| | | GGTNKRAPWTPARFSGSLLGGKAALTITGAQAEDEADYYCALWYSNLWV | |
| | | FGGGTKLTVLGGGGSGGGGSGGGGSGGGGSEVQLVESGGGLVQPGGSLR | |
| | | LSCAASGFTFSTYAMNWVRQAPGKGLEWVGRIRSKYNNYATYYADSVKG | |
| | | RFTISRDDSKNSLYLQMNSLKTEDTAVYYCVRHGNFGNSYVSWFAYWGQ | |
| | | GTLVTVSSDKTHTCPPCPAPEAAGPSVFLFPPKPKDTLMISRTPEVTCV | |
| | | VVDVSHEDPEVKFNWYVDGVEVHNAKTKPREEQYNSTYRVVSVLTVLHQ | |
| | | DWLNGKEYKCKVSNKALPAPIEKTISKAKGQPREPQVYTLPPSREEMTK | |
| | | NQVSLSCAVKGFYPSDIAVEWESNGQPENNYKTTPPVLDSDGSFFLVSK | |
| | | LTVDKSRWQQGNVFSCSVMHEALHNRFTQKSLSLSPGK | |
| | 3^{rd} | EIVLTQSPATLSLSPGERATLSCRASSSVSYMHWYQQKPGQAPRPWIYA | 420 |
| | chain | TSNLASGIPARFSGSRSGTDYTLTISSLEPEDFAVYYCQQWSSNTLTFG | |
| | | GGTKVEIKRTVAAPSVFIFPPSDEQLKSGTASVVCLLNNFYPREAKVQW | |
| | | KVDNALQSGNSQESVTEQDSKDSTYSLSSTLTLSKADYEKHKVYACEVT | |
| | | HQGLSSPVTKSFNRGEC | |
| Ly2003 | 1^{st} | QVQLVQSGAEVKKPGASVKVSCKASGYTFTSYVMHWVRQKPGQGLEWIG | 421 |
| | chain | YINPYNEGTESTDKFKGRATMTSDKSTSTVYMELSSLRSEDTAVYYCAS | |
| | | IYYGYEGTYFGVWGQGTLVTVSSASTKGPSVFPLAPSSKSTSGGTAALG | |
| | | CLVKDYFPEPVTVSWNSGALTSGVHTFPAVLQSSGLYSLSSVVTVPSSS | |
| | | LGTQTYICNVNHKPSNTKVDKKVEPKSCDKTHTCPPCPAPEAAGPSVFL | |
| | | FPPKPKDTLMISRTPEVTCVVVDVSHEDPEVKFNWYVDGVEVHNAKTKP | |
| | | REEQYNSTYRVVSVLTVLHQDWLNGKEYKCKVSNKALPAPIEKTISKAK | |
| | | GQPREPQVYTLPPSREEMTKNQVSLWCLVKGFYPSDIAVEWESNGQPEN | |
| | | NYKTTPPVLDSDGSFFLYSKLTVDKSRWQQGNVFSCSVMHEALHNHYTQ | |
| | | KSLSLSPGGGGGSGGGGSGGGGSGGGGSDIQMTQSPSSLSASVGDRVTI | |
| | | TCHASQNIYVWLNWYQQKPGKAPKLLIYKASNLHTGVPSRFSGSGSGTD | |
| | | FTLTISSLQPEDFATYYCQQGQTYPYTFGGGTKVEIKGGGGSGGGGSGG | |
| | | GGSGGGGSQVQLVQSGAEVKKPGASVKVSCKASGYTFTSYYIHWVRQAP | |
| | | GQGLEWIGCIYPGNVNTNYNEKFKDRATLTVDTSISTAYMELSRLRSDD | |
| | | TAVYFCTRSHYGLDWNFDVWGQGTTVTVSS | |
| | 2^{nd} | QVQLVQSGAEVKKPGASVKVSCKASGYTFTSYVMHWVRQKPGQGLEWIG | 422 |
| | chain | YINPYNEGTESTDKFKGRATMTSDKSTSTVYMELSSLRSEDTAVYYCAS | |
| | | IYYGYEGTYFGVWGQGTLVTVSSASTKGPSVFPLAPSSKSTSGGTAALG | |
| | | CLVKDYFPEPVTVSWNSGALTSGVHTFPAVLQSSGLYSLSSVVTVPSSS | |
| | | LGTQTYICNVNHKPSNTKVDKKVEPKSCGGGGSGGGGSGGGGSGGGGSQ | |
| | | AVVTQEPSLTVSPGGTVTLTCRSSTGAVTTSNYANWVQQKPGQAPRGLI | |
| | | GGTNKRAPWTPARFSGSLLGGKAALTITGAQAEDEADYYCALWYSNLWV | |
| | | FGGGTKLTVLGGGGSGGGGSGGGGSGGGGSEVQLVESGGGLVQPGGSLR | |
| | | LSCAASGFTFSTYAMNWVRQAPGKGLEWVGRIRSKYNNYATYYADSVKG | |
| | | RFTISRDDSKNSLYLQMNSLKTEDTAVYYCVRHGNFGNSYVSWFAYWGQ | |
| | | GTLVTVSSDKTHTCPPCPAPEAAGPSVFLFPPKPKDTLMISRTPEVTCV | |
| | | VVDVSHEDPEVKFNWYVDGVEVHNAKTKPREEQYNSTYRVVSVLTVLHQ | |
| | | DWLNGKEYKCKVSNKALPAPIEKTISKAKGQPREPQVYTLPPSREEMTK | |
| | | NQVSLSCAVKGFYPSDIAVEWESNGQPENNYKTTPPVLDSDGSFFLVSK | |
| | | LTVDKSRWQQGNVFSCSVMHEALHNRFTQKSLSLSPGGGGGSGGGGSGG | |
| | | GGSGGGGSDIQMTQSPSSLSASVGDRVTITCHASQNIYVWLNWYQQKPG | |
| | | KAPKLLIYKASNLHTGVPSRFSGSGSGTDFTLTISSLQPEDFATYYCQQ | |
| | | GQTYPYTFGGGTKVEIKGGGGSGGGGSGGGGSGGGGSQVQLVQSGAEVK | |
| | | KPGASVKVSCKASGYTFTSYYIHWVRQAPGQGLEWIGCIYPGNVNTNYN | |
| | | EKFKDRATLTVDTSISTAYMELSRLRSDDTAVYFCTRSHYGLDWNFDVW | |
| | | GQGTTVTVSS | |
| | 3^{rd} | EIVLTQSPATLSLSPGERATLSCRASSSVSYMHWYQQKPGQAPRPWIYA | 423 |
| | chain | TSNLASGIPARFSGSRSGTDYTLTISSLEPEDFAVYYCQQWSSNTLTFG | |
| | | GGTKVEIKRTVAAPSVFIFPPSDEQLKSGTASVVCLLNNFYPREAKVQW | |
| | | KVDNALQSGNSQESVTEQDSKDSTYSLSSTLTLSKADYEKHKVYACEVT | |
| | | HQGLSSPVTKSFNRGEC | |
| Ly2004 | 1^{st} | QVQLVQSGAEVKKPGASVKVSCKASGYTFTSYVMHWVRQKPGQGLEWIG | 424 |
| | chain | YINPYNEGTESTDKFKGRATMTSDKSTSTVYMELSSLRSEDTAVYYCAS | |
| | | IYYGYEGTYFGVWGQGTLVTVSSASTKGPSVFPLAPSSKSTSGGTAALG | |
| | | CLVKDYFPEPVTVSWNSGALTSGVHTFPAVLQSSGLYSLSSVVTVPSSS | |
| | | LGTQTYICNVNHKPSNTKVDKKVEPKSCDKTHTCPPCPAPEAAGPSVFL | |
| | | FPPKPKDTLMISRTPEVTCVVVDVSHEDPEVKFNWYVDGVEVHNAKTKP | |
| | | REEQYNSTYRVVSVLTVLHQDWLNGKEYKCKVSNKALPAPIEKTISKAK | |
| | | GQPREPQVYTLPPSREEMTKNQVSLWCLVKGFYPSDIAVEWESNGQPEN | |
| | | NYKTTPPVLDSDGSFFLYSKLTVDKSRWQQGNVFSCSVMHEALHNHYTQ | |
| | | KSLSLSPGGGGGSGGGGSGGGGSGGGGSQVQLVQSGAEVKKPGASVKVS | |
| | | CKASGYTFTSYYIHWVRQAPGQGLEWIGCIYPGNVNTNYNEKFKDRATL | |
| | | TVDTSISTAYMELSRLRSDDTAVYFCTRSHYGLDWNFDVWGQGTTVTVS | |
| | | SGGGGSGGGGSGGGGSGGGGSDIQMTQSPSSLSASVGDRVTITCHASQN | |
| | | IYVWLNWYQQKPGKAPKLLIYKASNLHTGVPSRFSGSGSGTDFTLTISS | |
| | | LQPEDFATYYCQQGQTYPYTFGGGTKVEIK | |
| | 2^{nd} | QVQLVQSGAEVKKPGASVKVSCKASGYTFTSYVMHWVRQKPGQGLEWIG | 425 |
| | chain | YINPYNEGTESTDKFKGRATMTSDKSTSTVYMELSSLRSEDTAVYYCAS | |
| | | IYYGYEGTYFGVWGQGTLVTVSSASTKGPSVFPLAPSSKSTSGGTAALG | |
| | | CLVKDYFPEPVTVSWNSGALTSGVHTFPAVLQSSGLYSLSSVVTVPSSS | |
| | | LGTQTYICNVNHKPSNTKVDKKVEPKSCGGGGSGGGGSGGGGSGGGGSQ | |
| | | AVVTQEPSLTVSPGGTVTLTCRSSTGAVTTSNYANWVQQKPGQAPRGLI | |
| | | GGTNKRAPWTPARFSGSLLGGKAALTITGAQAEDEADYYCALWYSNLWV | |
| | | FGGGTKLTVLGGGGSGGGGSGGGGSGGGGSEVQLVESGGGLVQPGGSLR | |
| | | LSCAASGFTFSTYAMNWVRQAPGKGLEWVGRIRSKYNNYATYYADSVKG | |
| | | RFTISRDDSKNSLYLQMNSLKTEDTAVYYCVRHGNFGNSYVSWFAYWGQ | |
| | | GTLVTVSSDKTHTCPPCPAPEAAGPSVFLFPPKPKDTLMISRTPEVTCV | |
| | | VVDVSHEDPEVKFNWYVDGVEVHNAKTKPREEQYNSTYRVVSVLTVLHQ | |
| | | DWLNGKEYKCKVSNKALPAPIEKTISKAKGQPREPQVYTLPPSREEMTK | |
| | | NQVSLSCAVKGFYPSDIAVEWESNGQPENNYKTTPPVLDSDGSFFLVSK | |
| | | LTVDKSRWQQGNVFSCSVMHEALHNRFTQKSLSLSPGGGGGSGGGGSGG | |
| | | GGSGGGGSQVQLVQSGAEVKKPGASVKVSCKASGYTFTSYYIHWVRQAP | |
| | | GQGLEWIGCIYPGNVNTNYNEKFKDRATLTVDTSISTAYMELSRLRSDD | |
| | | TAVYFCTRSHYGLDWNFDVWGQGTTVTVSSGGGGSGGGGSGGGGSGGGG | |
| | | SDIQMTQSPSSLSASVGDRVTITCHASQNIYVWLNWYQQKPGKAPKLLI | |
| | | YKASNLHTGVPSRFSGSGSGTDFTLTISSLQPEDFATYYCQQGQTYPYT | |
| | | FGGGTKVEIK | |
| | 3^{rd} | EIVLTQSPATLSLSPGERATLSCRASSSVSYMHWYQQKPGQAPRPWIYA | 426 |
| | chain | TSNLASGIPARFSGSRSGTDYTLTISSLEPEDFAVYYCQQWSSNTLTFG | |
| | | GGTKVEIKRTVAAPSVFIFPPSDEQLKSGTASVVCLLNNFYPREAKVQW | |
| | | KVDNALQSGNSQESVTEQDSKDSTYSLSSTLTLSKADYEKHKVYACEVT | |
| | | HQGLSSPVTKSFNRGEC | |
| Ly2005 | 1^{st} | QVQLVQSGAEVKKPGASVKVSCKASGYTFTSYVMHWVRQKPGQGLEWIG | 427 |
| | chain | YINPYNEGTESTDKFKGRATMTSDKSTSTVYMELSSLRSEDTAVYYCAS | |
| | | IYYGYEGTYFGVWGQGTLVTVSSASTKGPSVFPLAPSSKSTSGGTAALG | |
| | | CLVKDYFPEPVTVSWNSGALTSGVHTFPAVLQSSGLYSLSSVVTVPSSS | |
| | | LGTQTYICNVNHKPSNTKVDKKVEPKSCDKTHTCPPCPAPEAAGPSVFL | |
| | | FPPKPKDTLMISRTPEVTCVVVDVSHEDPEVKFNWYVDGVEVHNAKTKP | |
| | | REEQYNSTYRVVSVLTVLHQDWLNGKEYKCKVSNKALPAPIEKTISKAK | |
| | | GQPREPQVYTLPPSREEMTKNQVSLWCLVKGFYPSDIAVEWESNGQPEN | |
| | | NYKTTPPVLDSDGSFFLYSKLTVDKSRWQQGNVFSCSVMHEALHNHYTQ | |
| | | KSLSLSPGK | |
| | 2^{nd} | QVQLVQSGAEVKKPGASVKVSCKASGYTFTSYVMHWVRQKPGQGLEWIG | 428 |
| | chain | YINPYNEGTESTDKFKGRATMTSDKSTSTVYMELSSLRSEDTAVYYCAS | |
| | | IYYGYEGTYFGVWGQGTLVTVSSASTKGPSVFPLAPSSKSTSGGTAALG | |
| | | CLVKDYFPEPVTVSWNSGALTSGVHTFPAVLQSSGLYSLSSVVTVPSSS | |
| | | LGTQTYICNVNHKPSNTKVDKKVEPKSCGGGGSGGGGSGGGGSGGGGSQ | |
| | | AVVTQEPSLTVSPGGTVTLTCRSSTGAVTTSNYANWVQQKPGQAPRGLI | |
| | | GGTNKRAPWTPARFSGSLLGGKAALTITGAQAEDEADYYCALWYSNLWV | |
| | | FGGGTKLTVLGGGGSGGGGSGGGGSGGGGSEVQLVESGGGLVQPGGSLR | |
| | | LSCAASGFTFSTYAMNWVRQAPGKGLEWVGRIRSKYNNYATYYADSVKG | |
| | | RFTISRDDSKNSLYLQMNSLKTEDTAVYYCVRHGNFGNSYVSWFAYWGQ | |
| | | GTLVTVSSDKTHTCPPCPAPEAAGPSVFLFPPKPKDTLMISRTPEVTCV | |
| | | VVDVSHEDPEVKFNWYVDGVEVHNAKTKPREEQYNSTYRVVSVLTVLHQ | |
| | | DWLNGKEYKCKVSNKALPAPIEKTISKAKGQPREPQVYTLPPSREEMTK | |
| | | NQVSLSCAVKGFYPSDIAVEWESNGQPENNYKTTPPVLDSDGSFFLVSK | |
| | | LTVDKSRWQQGNVFSCSVMHEALHNRFTQKSLSLSPGGGGGSGGGGSGG | |
| | | GGSGGGGSDIQMTQSPSSLSASVGDRVTITCHASQNIYVWLNWYQQKPG | |
| | | KAPKLLIYKASNLHTGVPSRFSGSGSGTDFTLTISSLQPEDFATYYCQQ | |
| | | GQTYPYTFGGGTKVEIKGGGGSGGGGSGGGGSGGGGSQVQLVQSGAEVK | |
| | | KPGASVKVSCKASGYTFTSYYIHWVRQAPGQGLEWIGCIYPGNVNTNYN | |
| | | EKFKDRATLTVDTSISTAYMELSRLRSDDTAVYFCTRSHYGLDWNFDVW | |
| | | GQGTTVTVSS | |
| | 3^{rd} | EIVLTQSPATLSLSPGERATLSCRASSSVSYMHWYQQKPGQAPRPWIYA | 429 |
| | chain | TSNLASGIPARFSGSRSGTDYTLTISSLEPEDFAVYYCQQWSSNTLTFG | |
| | | GGTKVEIKRTVAAPSVFIFPPSDEQLKSGTASVVCLLNNFYPREAKVQW | |
| | | KVDNALQSGNSQESVTEQDSKDSTYSLSSTLTLSKADYEKHKVYACEVT | |
| | | HQGLSSPVTKSFNRGEC | |
| Ly2006 | 1^{st} | QVQLVQSGAEVKKPGASVKVSCKASGYTFTSYVMHWVRQKPGQGLEWIG | 430 |
| | chain | YINPYNEGTESTDKFKGRATMTSDKSTSTVYMELSSLRSEDTAVYYCAS | |
| | | IYYGYEGTYFGVWGQGTLVTVSSASTKGPSVFPLAPSSKSTSGGTAALG | |
| | | CLVKDYFPEPVTVSWNSGALTSGVHTFPAVLQSSGLYSLSSVVTVPSSS | |
| | | LGTQTYICNVNHKPSNTKVDKKVEPKSCDKTHTCPPCPAPEAAGPSVFL | |
| | | FPPKPKDTLMISRTPEVTCVVVDVSHEDPEVKFNWYVDGVEVHNAKTKP | |
| | | REEQYNSTYRVVSVLTVLHQDWLNGKEYKCKVSNKALPAPIEKTISKAK | |
| | | GQPREPQVYTLPPSREEMTKNQVSLWCLVKGFYPSDIAVEWESNGQPEN | |
| | | NYKTTPPVLDSDGSFFLYSKLTVDKSRWQQGNVFSCSVMHEALHNHYTQ | |
| | | KSLSLSPGK | |
| | 2^{nd} | QVQLVQSGAEVKKPGASVKVSCKASGYTFTSYVMHWVRQKPGQGLEWIG | 431 |
| | chain | YINPYNEGTESTDKFKGRATMTSDKSTSTVYMELSSLRSEDTAVYYCAS | |
| | | IYYGYEGTYFGVWGQGTLVTVSSASTKGPSVFPLAPSSKSTSGGTAALG | |
| | | CLVKDYFPEPVTVSWNSGALTSGVHTFPAVLQSSGLYSLSSVVTVPSSS | |
| | | LGTQTYICNVNHKPSNTKVDKKVEPKSCGGGGSGGGGSGGGGSGGGGSQ | |
| | | AVVTQEPSLTVSPGGTVTLTCRSSTGAVTTSNYANWVQQKPGQAPRGLI | |
| | | GGTNKRAPWTPARFSGSLLGGKAALTITGAQAEDEADYYCALWYSNLWV | |
| | | FGGGTKLTVLGGGGSGGGGSGGGGSGGGGSEVQLVESGGGLVQPGGSLR | |
| | | LSCAASGFTFSTYAMNWVRQAPGKGLEWVGRIRSKYNNYATYYADSVKG | |
| | | RFTISRDDSKNSLYLQMNSLKTEDTAVYYCVRHGNFGNSYVSWFAYWGQ | |
| | | GTLVTVSSDKTHTCPPCPAPEAAGPSVFLFPPKPKDTLMISRTPEVTCV | |
| | | VVDVSHEDPEVKFNWYVDGVEVHNAKTKPREEQYNSTYRVVSVLTVLHQ | |
| | | DWLNGKEYKCKVSNKALPAPIEKTISKAKGQPREPQVYTLPPSREEMTK | |
| | | NQVSLSCAVKGFYPSDIAVEWESNGQPENNYKTTPPVLDSDGSFFLVSK | |
| | | LTVDKSRWQQGNVFSCSVMHEALHNRFTQKSLSLSPGGGGGSGGGGSGG | |
| | | GGSGGGGSQVQLVQSGAEVKKPGASVKVSCKASGYTFTSYYIHWVRQAP | |
| | | GQGLEWIGCIYPGNVNTNYNEKFKDRATLTVDTSISTAYMELSRLRSDD | |
| | | TAVYFCTRSHYGLDWNFDVWGQGTTVTVSSGGGGSGGGGSGGGGSGGGG | |
| | | SDIQMTQSPSSLSASVGDRVTITCHASQNIYVWLNWYQQKPGKAPKLLI | |
| | | YKASNLHTGVPSRFSGSGSGTDFTLTISSLQPEDFATYYCQQGQTYPYT | |
| | | FGGGTKVEIK | |
| | 3^{rd} | EIVLTQSPATLSLSPGERATLSCRASSSVSYMHWYQQKPGQAPRPWIYA | 432 |
| | chain | TSNLASGIPARFSGSRSGTDYTLTISSLEPEDFAVYYCQQWSSNTLTFG | |
| | | GGTKVEIKRTVAAPSVFIFPPSDEQLKSGTASVVCLLNNFYPREAKVQW | |
| | | KVDNALQSGNSQESVTEQDSKDSTYSLSSTLTLSKADYEKHKVYACEVT | |
| | | HQGLSSPVTKSFNRGEC | |
| Ly2007 | 1^{st} | QVQLVQSGAEVKKPGASVKVSCKASGYTFTSYVMHWVRQKPGQGLEWIG | 433 |
| | chain | YINPYNEGTESTDKFKGRATMTSDKSTSTVYMELSSLRSEDTAVYYCAS | |
| | | IYYGYEGTYFGVWGQGTLVTVSSASTKGPSVFPLAPSSKSTSGGTAALG | |
| | | CLVKDYFPEPVTVSWNSGALTSGVHTFPAVLQSSGLYSLSSVVTVPSSS | |
| | | LGTQTYICNVNHKPSNTKVDKKVEPKSCGGGGSGGGGSGGGGSGGGGSE | |
| | | VQLVESGGGLVQPGGSLRLSCAASGFTESTYAMNWVRQAPGKGLEWVGR | |
| | | IRSKYNNYATYYADSVKGRFTISRDDSKNSLYLQMNSLKTEDTAVYYCV | |
| | | RHGNFGNSYVSWFAYWGQGTLVTVSSPAPEAAGPSVFLFPPKPKDTLMI | |
| | | SRTPEVTCVVVDVSHEDPEVKFNWYVDGVEVHNAKTKPREEQYNSTYRV | |
| | | VSVLTVLHQDWLNGKEYKCKVSNKALPAPIEKTISKAKGQPREPQVYTL | |
| | | PPSREEMTKNQVSLWCLVKGFYPSDIAVEWESNGQPENNYKTTPPVLDS | |
| | | DGSFFLYSKLTVDKSRWQQGNVFSCSVMHEALHNHYTQKSLSLSPGGGG | |
| | | GSGGGGSGGGGSGGGGSDIQMTQSPSSLSASVGDRVTITCHASQNIYVW | |
| | | LNWYQQKPGKAPKLLIYKASNLHTGVPSRFSGSGSGTDFTLTISSLQPE | |
| | | DFATYYCQQGQTYPYTFGGGTKVEIKGGGGSGGGGSGGGGSGGGGSQVQ | |
| | | LVQSGAEVKKPGASVKVSCKASGYTFTSYYIHWVRQAPGQGLEWIGCIY | |
| | | PGNVNTNYNEKFKDRATLTVDTSISTAYMELSRLRSDDTAVYFCTRSHY | |
| | | GLDWNFDVWGQGTTVTVSS | |
| | 2^{nd} | QVQLVQSGAEVKKPGASVKVSCKASGYTFTSYVMHWVRQKPGQGLEWIG | 434 |
| | chain | YINPYNEGTESTDKFKGRATMTSDKSTSTVYMELSSLRSEDTAVYYCAS | |
| | | IYYGYEGTYFGVWGQGTLVTVSSASTKGPSVFPLAPSSKSTSGGTAALG | |
| | | CLVKDYFPEPVTVSWNSGALTSGVHTFPAVLQSSGLYSLSSVVTVPSSS | |
| | | LGTQTYICNVNHKPSNTKVDKKVEPKSCGGGGSGGGGSGGGGSGGGGSQ | |
| | | AVVTQEPSLTVSPGGTVTLTCRSSTGAVTTSNYANWVQQKPGQAPRGLI | |
| | | GGTNKRAPWTPARFSGSLLGGKAALTITGAQAEDEADYYCALWYSNLWV | |
| | | FGGGTKLTVLPAPEAAGPSVFLFPPKPKDTLMISRTPEVTCVVVDVSHE | |
| | | DPEVKFNWYVDGVEVHNAKTKPREEQYNSTYRVVSVLTVLHQDWLNGKE | |
| | | YKCKVSNKALPAPIEKTISKAKGQPREPQVYTLPPSREEMTKNQVSLSC | |
| | | AVKGFYPSDIAVEWESNGQPENNYKTTPPVLDSDGSFFLVSKLTVDKSR | |
| | | WQQGNVFSCSVMHEALHNRFTQKSLSLSPGGGGGSGGGGSGGGGSGGGG | |
| | | SDIQMTQSPSSLSASVGDRVTITCHASQNIYVWLNWYQQKPGKAPKLLI | |
| | | YKASNLHTGVPSRFSGSGSGTDFTLTISSLQPEDFATYYCQQGQTYPYT | |
| | | FGGGTKVEIKGGGGSGGGGSGGGGSGGGGSQVQLVQSGAEVKKPGASVK | |
| | | VSCKASGYTFTSYYIHWVRQAPGQGLEWIGCIYPGNVNTNYNEKFKDRA | |
| | | TLTVDTSISTAYMELSRLRSDDTAVYFCTRSHYGLDWNFDVWGQGTTVT | |
| | | VSS | |
| | 3^{rd} | EIVLTQSPATLSLSPGERATLSCRASSSVSYMHWYQQKPGQAPRPWIYA | 435 |
| | chain | TSNLASGIPARFSGSRSGTDYTLTISSLEPEDFAVYYCQQWSSNTLTFG | |
| | | GGTKVEIKRTVAAPSVFIFPPSDEQLKSGTASVVCLLNNFYPREAKVQW | |
| | | KVDNALQSGNSQESVTEQDSKDSTYSLSSTLTLSKADYEKHKVYACEVT | |
| | | HQGLSSPVTKSFNRGEC | |
| Ly2008 | 1^{st} | QVQLVQSGAEVKKPGASVKVSCKASGYTFTSYVMHWVRQKPGQGLEWIG | 436 |
| | chain | YINPYNEGTESTDKFKGRATMTSDKSTSTVYMELSSLRSEDTAVYYCAS | |
| | | IYYGYEGTYFGVWGQGTLVTVSSASTKGPSVFPLAPSSKSTSGGTAALG | |
| | | CLVKDYFPEPVTVSWNSGALTSGVHTFPAVLQSSGLYSLSSVVTVPSSS | |
| | | LGTQTYICNVNHKPSNTKVDKKVEPKSCGGGGSGGGGSGGGGSGGGGSE | |
| | | VQLVESGGGLVQPGGSLRLSCAASGFTFSTYAMNWVRQAPGKGLEWVGR | |
| | | IRSKYNNYATYYADSVKGRFTISRDDSKNSLYLQMNSLKTEDTAVYYCV | |
| | | RHGNFGNSYVSWFAYWGQGTLVTVSSPAPEAAGPSVFLFPPKPKDTLMI | |
| | | SRTPEVTCVVVDVSHEDPEVKFNWYVDGVEVHNAKTKPREEQYNSTYRV | |
| | | VSVLTVLHQDWLNGKEYKCKVSNKALPAPIEKTISKAKGQPREPQVYTL | |
| | | PPSREEMTKNQVSLWCLVKGFYPSDIAVEWESNGQPENNYKTTPPVLDS | |
| | | DGSFFLYSKLTVDKSRWQQGNVFSCSVMHEALHNHYTQKSLSLSPGGGG | |
| | | GSGGGGSGGGGSGGGGSQVQLVQSGAEVKKPGASVKVSCKASGYTFTSY | |
| | | YIHWVRQAPGQGLEWIGCIYPGNVNTNYNEKFKDRATLTVDTSISTAYM | |
| | | ELSRLRSDDTAVYFCTRSHYGLDWNFDVWGQGTTVTVSSGGGGSGGGGS | |
| | | GGGGSGGGGSDIQMTQSPSSLSASVGDRVTITCHASQNIYVWLNWYQQK | |
| | | PGKAPKLLIYKASNLHTGVPSRFSGSGSGTDFTLTISSLQPEDFATYYC | |
| | | QQGQTYPYTFGGGTKVEIK | |
| | 2^{nd} | QVQLVQSGAEVKKPGASVKVSCKASGYTFTSYVMHWVRQKPGQGLEWIG | 437 |
| | chain | YINPYNEGTESTDKFKGRATMTSDKSTSTVYMELSSLRSEDTAVYYCAS | |
| | | IYYGYEGTYFGVWGQGTLVTVSSASTKGPSVFPLAPSSKSTSGGTAALG | |
| | | CLVKDYFPEPVTVSWNSGALTSGVHTFPAVLQSSGLYSLSSVVTVPSSS | |
| | | LGTQTYICNVNHKPSNTKVDKKVEPKSCGGGGSGGGGSGGGGSGGGGSQ | |
| | | AVVTQEPSLTVSPGGTVTLTCRSSTGAVTTSNYANWVQQKPGQAPRGLI | |
| | | GGTNKRAPWTPARFSGSLLGGKAALTITGAQAEDEADYYCALWYSNLWV | |
| | | FGGGTKLTVLPAPEAAGPSVFLFPPKPKDTLMISRTPEVTCVVVDVSHE | |
| | | DPEVKFNWYVDGVEVHNAKTKPREEQYNSTYRVVSVLTVLHQDWLNGKE | |
| | | YKCKVSNKALPAPIEKTISKAKGQPREPQVYTLPPSREEMTKNQVSLSC | |
| | | AVKGFYPSDIAVEWESNGQPENNYKTTPPVLDSDGSFFLVSKLTVDKSR | |
| | | WQQGNVFSCSVMHEALHNRFTQKSLSLSPGGGGGSGGGGSGGGGSGGGG | |
| | | SQVQLVQSGAEVKKPGASVKVSCKASGYTFTSYYIHWVRQAPGQGLEWI | |
| | | GCIYPGNVNTNYNEKFKDRATLTVDTSISTAYMELSRLRSDDTAVYFCT | |
| | | RSHYGLDWNFDVWGQGTTVTVSSGGGGSGGGGSGGGGSGGGGSDIQMTQ | |
| | | SPSSLSASVGDRVTITCHASQNIYVWLNWYQQKPGKAPKLLIYKASNLH | |
| | | TGVPSRFSGSGSGTDFTLTISSLQPEDFATYYCQQGQTYPYTFGGGTKV | |
| | | EIK | |
| | 3^{rd} | EIVLTQSPATLSLSPGERATLSCRASSSVSYMHWYQQKPGQAPRPWIYA | 438 |
| | chain | TSNLASGIPARFSGSRSGTDYTLTISSLEPEDFAVYYCQQWSSNTLTFG | |
| | | GGTKVEIKRTVAAPSVFIFPPSDEQLKSGTASVVCLLNNFYPREAKVQW | |
| | | KVDNALQSGNSQESVTEQDSKDSTYSLSSTLTLSKADYEKHKVYACEVT | |
| | | HQGLSSPVTKSFNRGEC | |
| Ly2009 | 1^{st} | QVQLVQSGAEVKKPGASVKVSCKASGYTFTSYVMHWVRQKPGQGLEWIG | 439 |
| | chain | YINPYNEGTESTDKFKGRATMTSDKSTSTVYMELSSLRSEDTAVYYCAS | |
| | | IYYGYEGTYFGVWGQGTLVTVSSASTKGPSVFPLAPSSKSTSGGTAALG | |
| | | CLVKDYFPEPVTVSWNSGALTSGVHTFPAVLQSSGLYSLSSVVTVPSSS | |
| | | LGTQTYICNVNHKPSNTKVDKKVEPKSCGGGGSGGGGSGGGGSGGGGSE | |
| | | VQLVESGGGLVQPGGSLRLSCAASGFTFSTYAMNWVRQAPGKGLEWVGR | |
| | | IRSKYNNYATYYADSVKGRFTISRDDSKNSLYLQMNSLKTEDTAVYYCV | |
| | | RHGNFGNSYVSWFAYWGQGTLVTVSSPAPEAAGPSVFLFPPKPKDTLMI | |
| | | SRTPEVTCVVVDVSHEDPEVKFNWYVDGVEVHNAKTKPREEQYNSTYRV | |
| | | VSVLTVLHQDWLNGKEYKCKVSNKALPAPIEKTISKAKGQPREPQVYTL | |
| | | PPSREEMTKNQVSLWCLVKGFYPSDIAVEWESNGQPENNYKTTPPVLDS | |
| | | DGSFFLYSKLTVDKSRWQQGNVFSCSVMHEALHNHYTQKSLSLSPGGGG | |
| | | GSGGGGSGGGGSGGGGSDIQMTQSPSSLSASVGDRVTITCHASQNIYVW | |
| | | LNWYQQKPGKAPKLLIYKASNLHTGVPSRFSGSGSGTDFTLTISSLQPE | |
| | | DFATYYCQQGQTYPYTFGGGTKVEIKGGGGSGGGGSGGGGSGGGGSQVQ | |
| | | LVQSGAEVKKPGASVKVSCKASGYTFTSYYIHWVRQAPGQGLEWIGCIY | |
| | | PGNVNTNYNEKFKDRATLTVDTSISTAYMELSRLRSDDTAVYFCTRSHY | |
| | | GLDWNFDVWGQGTTVTVSS | |
| | 2^{nd} | QVQLVQSGAEVKKPGASVKVSCKASGYTFTSYVMHWVRQKPGQGLEWIG | 440 |
| | chain | YINPYNEGTESTDKFKGRATMTSDKSTSTVYMELSSLRSEDTAVYYCAS | |
| | | IYYGYEGTYFGVWGQGTLVTVSSASTKGPSVFPLAPSSKSTSGGTAALG | |
| | | CLVKDYFPEPVTVSWNSGALTSGVHTFPAVLQSSGLYSLSSVVTVPSSS | |
| | | LGTQTYICNVNHKPSNTKVDKKVEPKSCGGGGSGGGGSGGGGSGGGGSQ | |
| | | AVVTQEPSLTVSPGGTVTLTCRSSTGAVTTSNYANWVQQKPGQAPRGLI | |
| | | GGTNKRAPWTPARFSGSLLGGKAALTITGAQAEDEADYYCALWYSNLWV | |
| | | FGGGTKLTVLPAPEAAGPSVFLFPPKPKDTLMISRTPEVTCVVVDVSHE | |
| | | DPEVKFNWYVDGVEVHNAKTKPREEQYNSTYRVVSVLTVLHQDWLNGKE | |
| | | YKCKVSNKALPAPIEKTISKAKGQPREPQVYTLPPSREEMTKNQVSLSC | |
| | | AVKGFYPSDIAVEWESNGQPENNYKTTPPVLDSDGSFFLVSKLTVDKSR | |
| | | WQQGNVFSCSVMHEALHNRFTQKSLSLSPGK | |
| | 3^{rd} | EIVLTQSPATLSLSPGERATLSCRASSSVSYMHWYQQKPGQAPRPWIYA | 441 |
| | chain | TSNLASGIPARFSGSRSGTDYTLTISSLEPEDFAVYYCQQWSSNTLTFG | |
| | | GGTKVEIKRTVAAPSVFIFPPSDEQLKSGTASVVCLLNNFYPREAKVQW | |
| | | KVDNALQSGNSQESVTEQDSKDSTYSLSSTLTLSKADYEKHKVYACEVT | |
| | | HQGLSSPVTKSFNRGEC | |
| Ly2010 | 1^{st} | QVQLVQSGAEVKKPGASVKVSCKASGYTFTSYVMHWVRQKPGQGLEWIG | 442 |
| | chain | YINPYNEGTESTDKFKGRATMTSDKSTSTVYMELSSLRSEDTAVYYCAS | |
| | | IYYGYEGTYFGVWGQGTLVTVSSASTKGPSVFPLAPSSKSTSGGTAALG | |
| | | CLVKDYFPEPVTVSWNSGALTSGVHTFPAVLQSSGLYSLSSVVTVPSSS | |
| | | LGTQTYICNVNHKPSNTKVDKKVEPKSCGGGGSGGGGSGGGGSGGGGSE | |
| | | VQLVESGGGLVQPGGSLRLSCAASGFTFSTYAMNWVRQAPGKGLEWVGR | |
| | | IRSKYNNYATYYADSVKGRFTISRDDSKNSLYLQMNSLKTEDTAVYYCV | |
| | | RHGNFGNSYVSWFAYWGQGTLVTVSSPAPEAAGPSVFLFPPKPKDTLMI | |
| | | SRTPEVTCVVVDVSHEDPEVKFNWYVDGVEVHNAKTKPREEQYNSTYRV | |
| | | VSVLTVLHQDWLNGKEYKCKVSNKALPAPIEKTISKAKGQPREPQVYTL | |
| | | PPSREEMTKNQVSLWCLVKGFYPSDIAVEWESNGQPENNYKTTPPVLDS | |
| | | DGSFFLYSKLTVDKSRWQQGNVFSCSVMHEALHNHYTQKSLSLSPGGGG | |
| | | GSGGGGSGGGGSGGGGSQVQLVQSGAEVKKPGASVKVSCKASGYTFTSY | |
| | | YIHWVRQAPGQGLEWIGCIYPGNVNTNYNEKFKDRATLTVDTSISTAYM | |
| | | ELSRLRSDDTAVYFCTRSHYGLDWNFDVWGQGTTVTVSSGGGGSGGGGS | |
| | | GGGGSGGGGSDIQMTQSPSSLSASVGDRVTITCHASQNIYVWLNWYQQK | |
| | | PGKAPKLLIYKASNLHTGVPSRFSGSGSGTDFTLTISSLQPEDFATYYC | |
| | | QQGQTYPYTFGGGTKVEIK | |
| | 2^{nd} | QVQLVQSGAEVKKPGASVKVSCKASGYTFTSYVMHWVRQKPGQGLEWIG | 443 |
| | chain | YINPYNEGTESTDKFKGRATMTSDKSTSTVYMELSSLRSEDTAVYYCAS | |
| | | IYYGYEGTYFGVWGQGTLVTVSSASTKGPSVFPLAPSSKSTSGGTAALG | |
| | | CLVKDYFPEPVTVSWNSGALTSGVHTFPAVLQSSGLYSLSSVVTVPSSS | |
| | | LGTQTYICNVNHKPSNTKVDKKVEPKSCGGGGSGGGGSGGGGSGGGGSQ | |
| | | AVVTQEPSLTVSPGGTVTLTCRSSTGAVTTSNYANWVQQKPGQAPRGLI | |
| | | GGTNKRAPWTPARFSGSLLGGKAALTITGAQAEDEADYYCALWYSNLWV | |
| | | FGGGTKLTVLPAPEAAGPSVFLFPPKPKDTLMISRTPEVTCVVVDVSHE | |
| | | DPEVKFNWYVDGVEVHNAKTKPREEQYNSTYRVVSVLIVLHQDWLNGKE | |
| | | YKCKVSNKALPAPIEKTISKAKGQPREPQVYTLPPSREEMTKNQVSLSC | |
| | | AVKGFYPSDIAVEWESNGQPENNYKTTPPVLDSDGSFFLVSKLTVDKSR | |
| | | WQQGNVFSCSVMHEALHNRFTQKSLSLSPGK | |
| | 3^{rd} | EIVLTQSPATLSLSPGERATLSCRASSSVSYMHWYQQKPGQAPRPWIYA | 444 |
| | chain | TSNLASGIPARFSGSRSGTDYTLTISSLEPEDFAVYYCQQWSSNTLTFG | |
| | | GGTKVEIKRTVAAPSVFIFPPSDEQLKSGTASVVCLLNNFYPREAKVQW | |
| | | KVDNALQSGNSQESVTEQDSKDSTYSLSSTLTLSKADYEKHKVYACEVT | |
| | | HQGLSSPVTKSFNRGEC | |
| Ly2011 | 1^{st} | QVQLVQSGAEVKKPGASVKVSCKASGYTFTSYVMHWVRQKPGQGLEWIG | 445 |
| | chain | YINPYNEGTESTDKFKGRATMTSDKSTSTVYMELSSLRSEDTAVYYCAS | |
| | | IYYGYEGTYFGVWGQGTLVTVSSASTKGPSVFPLAPSSKSTSGGTAALG | |
| | | CLVKDYFPEPVTVSWNSGALTSGVHTFPAVLQSSGLYSLSSVVTVPSSS | |
| | | LGTQTYICNVNHKPSNTKVDKKVEPKSCGGGGSGGGGSGGGGSGGGGSE | |
| | | VQLVESGGGLVQPGGSLRLSCAASGFTFSTYAMNWVRQAPGKGLEWVGR | |
| | | IRSKYNNYATYYADSVKGRFTISRDDSKNSLYLQMNSLKTEDTAVYYCV | |
| | | RHGNFGNSYVSWFAYWGQGTLVTVSSPAPEAAGPSVFLFPPKPKDTLMI | |
| | | SRTPEVTCVVVDVSHEDPEVKFNWYVDGVEVHNAKTKPREEQYNSTYRV | |
| | | VSVLTVLHQDWLNGKEYKCKVSNKALPAPIEKTISKAKGQPREPQVYTL | |
| | | PPSREEMTKNQVSLWCLVKGFYPSDIAVEWESNGQPENNYKTTPPVLDS | |
| | | DGSFFLYSKLTVDKSRWQQGNVFSCSVMHEALHNHYTQKSLSLSPGK | |
| | 2^{nd} | QVQLVQSGAEVKKPGASVKVSCKASGYTFTSYVMHWVRQKPGQGLEWIG | 446 |
| | chain | YINPYNEGTESTDKFKGRATMTSDKSTSTVYMELSSLRSEDTAVYYCAS | |
| | | IYYGYEGTYFGVWGQGTLVTVSSASTKGPSVFPLAPSSKSTSGGTAALG | |
| | | CLVKDYFPEPVTVSWNSGALTSGVHTFPAVLQSSGLYSLSSVVTVPSSS | |
| | | LGTQTYICNVNHKPSNTKVDKKVEPKSCGGGGSGGGGSGGGGSGGGGSQ | |
| | | AVVTQEPSLTVSPGGTVTLTCRSSTGAVTTSNYANWVQQKPGQAPRGLI | |
| | | GGTNKRAPWTPARFSGSLLGGKAALTITGAQAEDEADYYCALWYSNLWV | |
| | | FGGGTKLTVLPAPEAAGPSVFLFPPKPKDTLMISRTPEVTCVVVDVSHE | |
| | | DPEVKFNWYVDGVEVHNAKTKPREEQYNSTYRVVSVLTVLHQDWLNGKE | |
| | | YKCKVSNKALPAPIEKTISKAKGQPREPQVYTLPPSREEMTKNQVSLSC | |
| | | AVKGFYPSDIAVEWESNGQPENNYKTTPPVLDSDGSFFLVSKLTVDKSR | |
| | | WQQGNVFSCSVMHEALHNRFTQKSLSLSPGGGGGSGGGGSGGGGSGGGG | |
| | | SDIQMTQSPSSLSASVGDRVTITCHASQNIYVWLNWYQQKPGKAPKLLI | |
| | | YKASNLHTGVPSRFSGSGSGTDFTLTISSLQPEDFATYYCQQGQTYPYT | |
| | | FGGGTKVEIKGGGGSGGGGSGGGGSGGGGSQVQLVQSGAEVKKPGASVK | |
| | | VSCKASGYTFTSYYIHWVRQAPGQGLEWIGCIYPGNVNTNYNEKFKDRA | |
| | | TLTVDTSISTAYMELSRLRSDDTAVYFCTRSHYGLDWNFDVWGQGTTVT | |
| | | VSS | |
| | 3^{rd} | EIVLTQSPATLSLSPGERATLSCRASSSVSYMHWYQQKPGQAPRPWIYA | 447 |
| | chain | TSNLASGIPARFSGSRSGTDYTLTISSLEPEDFAVYYCQQWSSNTLTFG | |
| | | GGTKVEIKRTVAAPSVFIFPPSDEQLKSGTASVVCLLNNFYPREAKVQW | |
| | | KVDNALQSGNSQESVTEQDSKDSTYSLSSTLTLSKADYEKHKVYACEVT | |
| | | HQGLSSPVTKSFNRGEC | |
| Ly2012 | 1^{st} | QVQLVQSGAEVKKPGASVKVSCKASGYTFTSYVMHWVRQKPGQGLEWIG | 448 |
| | chain | YINPYNEGTESTDKFKGRATMTSDKSTSTVYMELSSLRSEDTAVYYCAS | |
| | | IYYGYEGTYFGVWGQGTLVTVSSASTKGPSVFPLAPSSKSTSGGTAALG | |
| | | CLVKDYFPEPVTVSWNSGALTSGVHTFPAVLQSSGLYSLSSVVTVPSSS | |
| | | LGTQTYICNVNHKPSNTKVDKKVEPKSCGGGGSGGGGSGGGGSGGGGSE | |
| | | VQLVESGGGLVQPGGSLRLSCAASGFTFSTYAMNWVRQAPGKGLEWVGR | |
| | | IRSKYNNYATYYADSVKGRFTISRDDSKNSLYLQMNSLKTEDTAVYYCV | |
| | | RHGNFGNSYVSWFAYWGQGTLVTVSSPAPEAAGPSVFLFPPKPKDTLMI | |
| | | SRTPEVTCVVVDVSHEDPEVKFNWYVDGVEVHNAKTKPREEQYNSTYRV | |
| | | VSVLTVLHQDWLNGKEYKCKVSNKALPAPIEKTISKAKGQPREPQVYTL | |
| | | PPSREEMTKNQVSLWCLVKGFYPSDIAVEWESNGQPENNYKTTPPVLDS | |
| | | DGSFFLYSKLTVDKSRWQQGNVFSCSVMHEALHNHYTQKSLSLSPGK | |
| | 2^{nd} | QVQLVQSGAEVKKPGASVKVSCKASGYTFTSYVMHWVRQKPGQGLEWIG | 449 |
| | chain | YINPYNEGTESTDKFKGRATMTSDKSTSTVYMELSSLRSEDTAVYYCAS | |
| | | IYYGYEGTYFGVWGQGTLVTVSSASTKGPSVFPLAPSSKSTSGGTAALG | |
| | | CLVKDYFPEPVTVSWNSGALTSGVHTFPAVLQSSGLYSLSSVVTVPSSS | |
| | | LGTQTYICNVNHKPSNTKVDKKVEPKSCGGGGSGGGGSGGGGSGGGGSQ | |
| | | AVVTQEPSLTVSPGGTVTLTCRSSTGAVTTSNYANWVQQKPGQAPRGLI | |
| | | GGTNKRAPWTPARFSGSLLGGKAALTITGAQAEDEADYYCALWYSNLWV | |
| | | FGGGTKLTVLPAPEAAGPSVFLFPPKPKDTLMISRTPEVTCVVVDVSHE | |
| | | DPEVKFNWYVDGVEVHNAKTKPREEQYNSTYRVVSVLTVLHQDWLNGKE | |
| | | YKCKVSNKALPAPIEKTISKAKGQPREPQVYTLPPSREEMTKNQVSLSC | |
| | | AVKGFYPSDIAVEWESNGQPENNYKTTPPVLDSDGSFFLVSKLTVDKSR | |
| | | WQQGNVFSCSVMHEALHNRFTQKSLSLSPGGGGGSGGGGSGGGGSGGGG | |
| | | SQVQLVQSGAEVKKPGASVKVSCKASGYTFTSYYIHWVRQAPGQGLEWI | |
| | | GCIYPGNVNTNYNEKFKDRATLTVDTSISTAYMELSRLRSDDTAVYFCT | |
| | | RSHYGLDWNFDVWGQGTTVTVSSGGGGSGGGGSGGGGSGGGGSDIQMTQ | |
| | | SPSSLSASVGDRVTITCHASQNIYVWLNWYQQKPGKAPKLLIYKASNLH | |
| | | TGVPSRFSGSGSGTDFTLTISSLQPEDFATYYCQQGQTYPYTFGGGTKV | |
| | | EIK | |
| | 3^{rd} | EIVLTQSPATLSLSPGERATLSCRASSSVSYMHWYQQKPGQAPRPWIYA | 450 |
| | chain | TSNLASGIPARFSGSRSGTDYTLTISSLEPEDFAVYYCQQWSSNTLTFG | |
| | | GGTKVEIKRTVAAPSVFIFPPSDEQLKSGTASVVCLLNNFYPREAKVQW | |
| | | KVDNALQSGNSQESVTEQDSKDSTYSLSSTLTLSKADYEKHKVYACEVT | |
| | | HQGLSSPVTKSFNRGEC | |
| Ly2013 | 1^{st} | QVQLVQSGAEVKKPGASVKVSCKASGYTFTSYVMHWVRQKPGQGLEWIG | 451 |
| | chain | YINPYNEGTESTDKFKGRATMTSDKSTSTVYMELSSLRSEDTAVYYCAS | |
| | | IYYGYEGTYFGVWGQGTLVTVSSASTKGPSVFPLAPSSKSTSGGTAALG | |
| | | CLVKDYFPEPVTVSWNSGALTSGVHTFPAVLQSSGLYSLSSVVTVPSSS | |
| | | LGTQTYICNVNHKPSNTKVDKKVEPKSCGGGGSGGGGSGGGGSGGGGSE | |
| | | VQLVESGGGLVQPGGSLRLSCAASGFTFSTYAMNWVRQAPGKGLEWVGR | |
| | | IRSKYNNYATYYADSVKGRFTISRDDSKNSLYLQMNSLKTEDTAVYYCV | |
| | | RHGNFGNSYVSWFAYWGQGTLVTVSSPAPEAAGPSVFLFPPKPKDTLMI | |
| | | SRTPEVTCVVVDVSHEDPEVKFNWYVDGVEVHNAKTKPREEQYNSTYRV | |
| | | VSVLTVLHQDWLNGKEYKCKVSNKALPAPIEKTISKAKGQPREPQVYTL | |
| | | PPSREEMTKNQVSLWCLVKGFYPSDIAVEWESNGQPENNYKTTPPVLDS | |
| | | DGSFFLYSKLTVDKSRWQQGNVFSCSVMHEALHNHYTQKSLSLSPGGGG | |
| | | GSGGGGSGGGGSGGGGSQVQLVQSGAEVKKPGASVKVSCKASGYTFTSY | |
| | | YIHWVRQAPGQGLEWIGCIYPGNVNTNYNEKFKDRATLTVDTSISTAYM | |
| | | ELSRLRSDDTAVYFCTRSHYGLDWNFDVWGQGTTVTVSS | |
| | 2^{nd} | QVQLVQSGAEVKKPGASVKVSCKASGYTFTSYVMHWVRQKPGQGLEWIG | 452 |
| | chain | YINPYNEGTESTDKFKGRATMTSDKSTSTVYMELSSLRSEDTAVYYCAS | |
| | | IYYGYEGTYFGVWGQGTLVTVSSASTKGPSVFPLAPSSKSTSGGTAALG | |
| | | CLVKDYFPEPVTVSWNSGALTSGVHTFPAVLQSSGLYSLSSVVTVPSSS | |
| | | LGTQTYICNVNHKPSNTKVDKKVEPKSCGGGGSGGGGSGGGGSGGGGSQ | |
| | | AVVTQEPSLTVSPGGTVTLTCRSSTGAVTTSNYANWVQQKPGQAPRGLI | |
| | | GGTNKRAPWTPARFSGSLLGGKAALTITGAQAEDEADYYCALWYSNLWV | |
| | | FGGGTKLTVLPAPEAAGPSVFLFPPKPKDTLMISRTPEVTCVVVDVSHE | |
| | | DPEVKFNWYVDGVEVHNAKTKPREEQYNSTYRVVSVLTVLHQDWLNGKE | |
| | | YKCKVSNKALPAPIEKTISKAKGQPREPQVYTLPPSREEMTKNQVSLSC | |
| | | AVKGFYPSDIAVEWESNGQPENNYKTTPPVLDSDGSFFLVSKLTVDKSR | |
| | | WQQGNVFSCSVMHEALHNRFTQKSLSLSPGGGGGSGGGGSGGGGSGGGG | |
| | | SDIQMTQSPSSLSASVGDRVTITCHASQNIYVWLNWYQQKPGKAPKLLI | |
| | | YKASNLHTGVPSRFSGSGSGTDFTLTISSLQPEDFATYYCQQGQTYPYT | |
| | | FGGGTKVEIK | |
| | 3^{rd} | EIVLTQSPATLSLSPGERATLSCRASSSVSYMHWYQQKPGQAPRPWIYA | 453 |
| | chain | TSNLASGIPARFSGSRSGTDYTLTISSLEPEDFAVYYCQQWSSNTLTFG | |
| | | GGTKVEIKRTVAAPSVFIFPPSDEQLKSGTASVVCLLNNFYPREAKVQW | |
| | | KVDNALQSGNSQESVTEQDSKDSTYSLSSTLTLSKADYEKHKVYACEVT | |
| | | HQGLSSPVTKSFNRGEC | |
| Ly2014 | 1^{st} | QVQLVQSGAEVKKPGASVKVSCKASGYTFTSYVMHWVRQKPGQGLEWIG | 454 |
| | chain | YINPYNEGTESTDKFKGRATMTSDKSTSTVYMELSSLRSEDTAVYYCAS | |
| | | IYYGYEGTYFGVWGQGTLVTVSSASTKGPSVFPLAPSSKSTSGGTAALG | |
| | | CLVKDYFPEPVTVSWNSGALTSGVHTFPAVLQSSGLYSLSSVVTVPSSS | |
| | | LGTQTYICNVNHKPSNTKVDKKVEPKSCGGGGSGGGGSGGGGSGGGGSE | |
| | | VQLVESGGGLVQPGGSLRLSCAASGFTFSTYAMNWVRQAPGKGLEWVGR | |
| | | IRSKYNNYATYYADSVKGRFTISRDDSKNSLYLQMNSLKTEDTAVYYCV | |
| | | RHGNFGNSYVSWFAYWGQGTLVTVSSPAPEAAGPSVFLFPPKPKDTLMI | |
| | | SRTPEVTCVVVDVSHEDPEVKFNWYVDGVEVHNAKTKPREEQYNSTYRV | |
| | | VSVLTVLHQDWLNGKEYKCKVSNKALPAPIEKTISKAKGQPREPQVYTL | |
| | | PPSREEMTKNQVSLWCLVKGFYPSDIAVEWESNGQPENNYKTTPPVLDS | |
| | | DGSFFLYSKLTVDKSRWQQGNVFSCSVMHEALHNHYTQKSLSLSPGK | |
| | 2^{nd} | QVQLVQSGAEVKKPGASVKVSCKASGYTFTSYVMHWVRQKPGQGLEWIG | 455 |
| | chain | YINPYNEGTESTDKFKGRATMTSDKSTSTVYMELSSLRSEDTAVYYCAS | |
| | | IYYGYEGTYFGVWGQGTLVTVSSASTKGPSVFPLAPSSKSTSGGTAALG | |
| | | CLVKDYFPEPVTVSWNSGALTSGVHTFPAVLQSSGLYSLSSVVTVPSSS | |
| | | LGTQTYICNVNHKPSNTKVDKKVEPKSCGGGGSGGGGSGGGGSGGGGSQ | |
| | | AVVTQEPSLTVSPGGTVTLTCRSSTGAVTTSNYANWVQQKPGQAPRGLI | |
| | | GGTNKRAPWTPARFSGSLLGGKAALTITGAQAEDEADYYCALWYSNLWV | |
| | | FGGGTKLTVLPAPEAAGPSVFLFPPKPKDTLMISRTPEVTCVVVDVSHE | |
| | | DPEVKFNWYVDGVEVHNAKTKPREEQYNSTYRVVSVLTVLHQDWLNGKE | |
| | | YKCKVSNKALPAPIEKTISKAKGQPREPQVYTLPPSREEMTKNQVSLSC | |
| | | AVKGFYPSDIAVEWESNGQPENNYKTTPPVLDSDGSFFLVSKLTVDKSR | |
| | | WQQGNVFSCSVMHEALHNRFTQKSLSLSPGK | |
| | 3^{rd} | EIVLTQSPATLSLSPGERATLSCRASSSVSYMHWYQQKPGQAPRPWIYA | 456 |
| | chain | TSNLASGIPARFSGSRSGTDYTLTISSLEPEDFAVYYCQQWSSNTLTFG | |
| | | GGTKVEIKRTVAAPSVFIFPPSDEQLKSGTASVVCLLNNFYPREAKVQW | |
| | | KVDNALQSGNSQESVTEQDSKDSTYSLSSTLTLSKADYEKHKVYACEVT | |
| | | HQGLSSPVTKSFNRGECGGGGSGGGGSGGGGSGGGGSDIQMTQSPSSLS | |
| | | ASVGDRVTITCHASQNIYVWLNWYQQKPGKAPKLLIYKASNLHTGVPSR | |
| | | FSGSGSGTDFTLTISSLQPEDFATYYCQQGQTYPYTFGGGTKVEIKGGG | |
| | | GSGGGGSGGGGSGGGGSQVQLVQSGAEVKKPGASVKVSCKASGYTFTSY | |
| | | YIHWVRQAPGQGLEWIGCIYPGNVNTNYNEKFKDRATLTVDTSISTAYM | |
| | | ELSRLRSDDTAVYFCTRSHYGLDWNFDVWGQGTTVTVSS | |
| Ly2015 | 1^{st} | QVQLVQSGAEVKKPGASVKVSCKASGYTFTSYVMHWVRQKPGQGLEWIG | 457 |
| | chain | YINPYNEGTESTDKFKGRATMTSDKSTSTVYMELSSLRSEDTAVYYCAS | |
| | | IYYGYEGTYFGVWGQGTLVTVSSASTKGPSVFPLAPSSKSTSGGTAALG | |
| | | CLVKDYFPEPVTVSWNSGALTSGVHTFPAVLQSSGLYSLSSVVTVPSSS | |
| | | LGTQTYICNVNHKPSNTKVDKKVEPKSCGGGGSGGGGSGGGGSGGGGSE | |
| | | VQLVESGGGLVQPGGSLRLSCAASGFTFSTYAMNWVRQAPGKGLEWVGR | |
| | | IRSKYNNYATYYADSVKGRFTISRDDSKNSLYLQMNSLKTEDTAVYYCV | |
| | | RHGNFGNSYVSWFAYWGQGTLVTVSSPAPEAAGPSVFLFPPKPKDTLMI | |
| | | SRTPEVTCVVVDVSHEDPEVKFNWYVDGVEVHNAKTKPREEQYNSTYRV | |
| | | VSVLTVLHQDWLNGKEYKCKVSNKALPAPIEKTISKAKGQPREPQVYTL | |
| | | PPSREEMTKNQVSLWCLVKGFYPSDIAVEWESNGQPENNYKTTPPVLDS | |
| | | DGSFFLYSKLTVDKSRWQQGNVFSCSVMHEALHNHYTQKSLSLSPGK | |
| | 2^{nd} | QVQLVQSGAEVKKPGASVKVSCKASGYTFTSYVMHWVRQKPGQGLEWIG | 458 |
| | chain | YINPYNEGTESTDKFKGRATMTSDKSTSTVYMELSSLRSEDTAVYYCAS | |
| | | IYYGYEGTYFGVWGQGTLVTVSSASTKGPSVFPLAPSSKSTSGGTAALG | |
| | | CLVKDYFPEPVTVSWNSGALTSGVHTFPAVLQSSGLYSLSSVVTVPSSS | |
| | | LGTQTYICNVNHKPSNTKVDKKVEPKSCGGGGSGGGGSGGGGSGGGGSQ | |
| | | AVVTQEPSLTVSPGGTVTLTCRSSTGAVTTSNYANWVQQKPGQAPRGLI | |
| | | GGTNKRAPWTPARFSGSLLGGKAALTITGAQAEDEADYYCALWYSNLWV | |
| | | FGGGTKLTVLPAPEAAGPSVFLFPPKPKDTLMISRTPEVTCVVVDVSHE | |
| | | DPEVKFNWYVDGVEVHNAKTKPREEQYNSTYRVVSVLTVLHQDWLNGKE | |
| | | YKCKVSNKALPAPIEKTISKAKGQPREPQVYTLPPSREEMTKNQVSLSC | |
| | | AVKGFYPSDIAVEWESNGQPENNYKTTPPVLDSDGSFFLVSKLTVDKSR | |
| | | WQQGNVFSCSVMHEALHNRFTQKSLSLSPGK | |
| | 3^{rd} | EIVLTQSPATLSLSPGERATLSCRASSSVSYMHWYQQKPGQAPRPWIYA | 459 |
| | chain | TSNLASGIPARFSGSRSGTDYTLTISSLEPEDFAVYYCQQWSSNTLTFG | |
| | | GGTKVEIKRTVAAPSVFIFPPSDEQLKSGTASVVCLLNNFYPREAKVQW | |
| | | KVDNALQSGNSQESVTEQDSKDSTYSLSSTLTLSKADYEKHKVYACEVT | |
| | | HQGLSSPVTKSFNRGECGGGGSGGGGSGGGGSGGGGSQVQLVQSGAEVK | |
| | | KPGASVKVSCKASGYTFTSYYIHWVRQAPGQGLEWIGCIYPGNVNTNYN | |
| | | EKFKDRATLTVDTSISTAYMELSRLRSDDTAVYFCTRSHYGLDWNFDVW | |
| | | GQGTTVTVSSGGGGSGGGGSGGGGSGGGGSDIQMTQSPSSLSASVGDRV | |
| | | TITCHASQNIYVWLNWYQQKPGKAPKLLIYKASNLHTGVPSRFSGSGSG | |
| | | TDFTLTISSLQPEDFATYYCQQGQTYPYTFGGGTKVEIK | |
| Ly2016 | 1^{st} | QVQLVQSGAEVKKPGASVKVSCKASGYTFTSYVMHWVRQKPGQGLEWIG | 460 |
| | chain | YINPYNEGTESTDKFKGRATMTSDKSTSTVYMELSSLRSEDTAVYYCAS | |
| | | IYYGYEGTYFGVWGQGTLVTVSSASTKGPSVFPLAPSSKSTSGGTAALG | |
| | | CLVKDYFPEPVTVSWNSGALTSGVHTFPAVLQSSGLYSLSSVVTVPSSS | |
| | | LGTQTYICNVNHKPSNTKVDKKVEPKSCDKTHTCPPCPAPEAAGPSVFL | |
| | | FPPKPKDTLMISRTPEVTCVVVDVSHEDPEVKFNWYVDGVEVHNAKTKP | |
| | | REEQYNSTYRVVSVLTVLHQDWLNGKEYKCKVSNKALPAPIEKTISKAK | |
| | | GQPREPQVYTLPPSREEMTKNQVSLWCLVKGFYPSDIAVEWESNGQPEN | |
| | | NYKTTPPVLDSDGSFFLYSKLTVDKSRWQQGNVFSCSVMHEALHNHYTQ | |
| | | KSLSLSPGGGGGSGGGGSGGGGSGGGGSDIQMTQSPSSLSASVGDRVTI | |
| | | TCHASQNIYVWLNWYQQKPGKAPKLLIYKASNLHTGVPSRFSGSGSGTD | |
| | | FTLTISSLQPEDFATYYCQQGQTYPYTFGGGTKVEIKGGGGSGGGGSGG | |
| | | GGSGGGGSQVQLVQSGAEVKKPGASVKVSCKASGYTFTSYYIHWVRQAP | |
| | | GQGLEWIGCIYPGNVNTNYNEKFKDRATLTVDTSISTAYMELSRLRSDD | |
| | | TAVYFCTRSHYGLDWNFDVWGQGTTVTVSS | |
| | 2^{nd} | QVQLVQSGAEVKKPGASVKVSCKASGYTFTSYVMHWVRQKPGQGLEWIG | 461 |
| | chain | YINPYNEGTESTDKFKGRATMTSDKSTSTVYMELSSLRSEDTAVYYCAS | |
| | | IYYGYEGTYFGVWGQGTLVTVSSASTKGPSVFPLAPSSKSTSGGTAALG | |
| | | CLVKDYFPEPVTVSWNSGALTSGVHTFPAVLQSSGLYSLSSVVTVPSSS | |
| | | LGTQTYICNVNHKPSNTKVDKKVEPKSCDKTHTCPPCPAPEAAGPSVFL | |
| | | FPPKPKDTLMISRTPEVTCVVVDVSHEDPEVKFNWYVDGVEVHNAKTKP | |
| | | REEQYNSTYRVVSVLTVLHQDWLNGKEYKCKVSNKALPAPIEKTISKAK | |
| | | GQPREPQVYTLPPSREEMTKNQVSLSCAVKGFYPSDIAVEWESNGQPEN | |
| | | NYKTTPPVLDSDGSFFLVSKLTVDKSRWQQGNVFSCSVMHEALHNRETQ | |
| | | KSLSLSPGGGGGSGGGGSGGGGSGGGGSDIQMTQSPSTLSASVGDRVTI | |
| | | TCSASSSVSYMNWYQQKPGKAPKLLIYDTSKLASGVPSRFSGSGSGTEF | |
| | | TLTISSLQPDDFATYYCQQWSSNPFTFGQGTKLEIKGGGGSGGGGSGGG | |
| | | GSGGGGSQVQLVQSGAEVKKPGASVKVSCKASGYTFTRYTMHWVRQAPG | |
| | | QGLEWMGYINPSRGYTNYNQKFKDRVTMTRDTSTSTVYMELSSLRSEDT | |
| | | AVYYCARYYDDHYCLDYWGQGTLVTVSS | |
| | 3^{rd} | EIVLTQSPATLSLSPGERATLSCRASSSVSYMHWYQQKPGQAPRPWIYA | 462 |
| | chain | TSNLASGIPARFSGSRSGTDYTLTISSLEPEDFAVYYCQQWSSNTLTFG | |
| | | GGTKVEIKRTVAAPSVFIFPPSDEQLKSGTASVVCLLNNFYPREAKVQW | |
| | | KVDNALQSGNSQESVTEQDSKDSTYSLSSTLTLSKADYEKHKVYACEVT | |
| | | HQGLSSPVTKSFNRGEC | |
| Ly2017 | 1^{st} | QVQLVQSGAEVKKPGASVKVSCKASGYTFTSYVMHWVRQKPGQGLEWIG | 463 |
| | chain | YINPYNEGTESTDKFKGRATMTSDKSTSTVYMELSSLRSEDTAVYYCAS | |
| | | IYYGYEGTYFGVWGQGTLVTVSSASTKGPSVFPLAPSSKSTSGGTAALG | |
| | | CLVKDYFPEPVTVSWNSGALTSGVHTFPAVLQSSGLYSLSSVVTVPSSS | |
| | | LGTQTYICNVNHKPSNTKVDKKVEPKSCDKTHTCPPCPAPEAAGPSVFL | |
| | | FPPKPKDTLMISRTPEVTCVVVDVSHEDPEVKFNWYVDGVEVHNAKTKP | |
| | | REEQYNSTYRVVSVLTVLHQDWLNGKEYKCKVSNKALPAPIEKTISKAK | |
| | | GQPREPQVYTLPPSREEMTKNQVSLWCLVKGFYPSDIAVEWESNGQPEN | |
| | | NYKTTPPVLDSDGSFFLYSKLTVDKSRWQQGNVFSCSVMHEALHNHYTQ | |
| | | KSLSLSPGGGGGSGGGGSGGGGSGGGGSQVQLVQSGAEVKKPGASVKVS | |
| | | CKASGYTFTSYYIHWVRQAPGQGLEWIGCIYPGNVNTNYNEKFKDRATL | |
| | | TVDTSISTAYMELSRLRSDDTAVYFCTRSHYGLDWNFDVWGQGTTVTVS | |
| | | SGGGGSGGGGSGGGGSGGGGSDIQMTQSPSSLSASVGDRVTITCHASQN | |
| | | IYVWLNWYQQKPGKAPKLLIYKASNLHTGVPSRFSGSGSGTDFTLTISS | |
| | | LQPEDFATYYCQQGQTYPYTFGGGTKVEIK | |
| | 2^{nd} | QVQLVQSGAEVKKPGASVKVSCKASGYTFTSYVMHWVRQKPGQGLEWIG | 464 |
| | chain | YINPYNEGTESTDKFKGRATMTSDKSTSTVYMELSSLRSEDTAVYYCAS | |
| | | IYYGYEGTYFGVWGQGTLVTVSSASTKGPSVFPLAPSSKSTSGGTAALG | |
| | | CLVKDYFPEPVTVSWNSGALTSGVHTFPAVLQSSGLYSLSSVVTVPSSS | |
| | | LGTQTYICNVNHKPSNTKVDKKVEPKSCDKTHTCPPCPAPEAAGPSVFL | |
| | | FPPKPKDTLMISRTPEVTCVVVDVSHEDPEVKFNWYVDGVEVHNAKTKP | |
| | | REEQYNSTYRVVSVLTVLHQDWLNGKEYKCKVSNKALPAPIEKTISKAK | |
| | | GQPREPQVYTLPPSREEMTKNQVSLSCAVKGFYPSDIAVEWESNGQPEN | |
| | | NYKTTPPVLDSDGSFFLVSKLTVDKSRWQQGNVFSCSVMHEALHNRFTQ | |
| | | KSLSLSPGGGGGSGGGGSGGGGSGGGGSDIQMTQSPSTLSASVGDRVTI | |
| | | TCSASSSVSYMNWYQQKPGKAPKLLIYDTSKLASGVPSRFSGSGSGTEF | |
| | | TLTISSLQPDDFATYYCQQWSSNPFTFGQGTKLEIKGGGGSGGGGSGGG | |
| | | GSGGGGSQVQLVQSGAEVKKPGASVKVSCKASGYTFTRYTMHWVRQAPG | |
| | | QGLEWMGYINPSRGYTNYNQKFKDRVTMTRDTSTSTVYMELSSLRSEDT | |
| | | AVYYCARYYDDHYCLDYWGQGTLVTVSS | |
| | 3^{rd} | EIVLTQSPATLSLSPGERATLSCRASSSVSYMHWYQQKPGQAPRPWIYA | 465 |
| | chain | TSNLASGIPARFSGSRSGTDYTLTISSLEPEDFAVYYCQQWSSNTLTFG | |
| | | GGTKVEIKRTVAAPSVFIFPPSDEQLKSGTASVVCLLNNFYPREAKVQW | |
| | | KVDNALQSGNSQESVTEQDSKDSTYSLSSTLTLSKADYEKHKVYACEVT | |
| | | HQGLSSPVTKSFNRGEC | |
| Ly2018 | 1^{st} | QVQLVQSGAEVKKPGASVKVSCKASGYTFTSYVMHWVRQKPGQGLEWIG | 466 |
| | chain | YINPYNEGTESTDKFKGRATMTSDKSTSTVYMELSSLRSEDTAVYYCAS | |
| | | IYYGYEGTYFGVWGQGTLVTVSSASTKGPSVFPLAPSSKSTSGGTAALG | |
| | | CLVKDYFPEPVTVSWNSGALTSGVHTFPAVLQSSGLYSLSSVVTVPSSS | |
| | | LGTQTYICNVNHKPSNTKVDKKVEPKSCGGGGSGGGGSGGGGSGGGGSE | |
| | | VQLVESGGGLVQPGGSLRLSCAASGFTFSTYAMNWVRQAPGKGLEWVGR | |
| | | IRSKYNNYATYYADSVKGRFTISRDDSKNSLYLQMNSLKTEDTAVYYCV | |
| | | RHGNFGNSYVSWFAYWGQGTLVTVSSPAPELLGPSVFLFPPKPKDTLMI | |
| | | SRTPEVTCVVVDVSHEDPEVKFNWYVDGVEVHNAKTKPREEQYNSTYRV | |
| | | VSVLTVLHQDWLNGKEYKCKVSNKALPAPIEKTISKAKGQPREPQVYTL | |
| | | PPSREEMTKNQVSLWCLVKGFYPSDIAVEWESNGQPENNYKTTPPVLDS | |
| | | DGSFFLYSKLTVDKSRWQQGNVFSCSVMHEALHNHYTQKSLSLSPGK | |
| | 2^{nd} | QVQLQESGPGLVKPSETLSLTCTVSGGSISSYYWSWIRQPPGKGLEWIG | 467 |
| | chain | YIYYSGITHYNPSLKSRVTISVDTSKIQFSLKLSSVTAADTAVYYCARW | |
| | | GVRRDYYYYGMDVWGQGTTVTVSSASVAAPSVFIFPPSDEQLKSGTASV | |
| | | VCLLNNFYPREAKVQWKVDNALQSGNSQESVTEQDSKDSTYSLSSTLTL | |
| | | SKADYEKHKVYACEVTHQGLSSPVTKSFNRGECGGGGSGGGGSGGGGSG | |
| | | GGGSQAVVTQEPSLTVSPGGTVTLTCRSSTGAVTTSNYANWVQQKPGQA | |
| | | PRGLIGGTNKRAPWTPARFSGSLLGGKAALTITGAQAEDEADYYCALWY | |
| | | SNLWVFGGGTKLTVLPAPELLGPSVFLFPPKPKDTLMISRTPEVTCVVV | |
| | | DVSHEDPEVKFNWYVDGVEVHNAKTKPREEQYNSTYRVVSVLTVLHQDW | |
| | | LNGKEYKCKVSNKALPAPIEKTISKAKGQPREPQVYTLPPSREEMTKNQ | |
| | | VSLSCAVKGFYPSDIAVEWESNGQPENNYKTTPPVLDSDGSFFLVSKLT | |
| | | VDKSRWQQGNVFSCSVMHEALHNRFTQKSLSLSPGK | |
| | 3^{rd} | EIVLTQSPATLSLSPGERATLSCRASSSVSYMHWYQQKPGQAPRPWIYA | 468 |
| | chain | TSNLASGIPARFSGSRSGTDYTLTISSLEPEDFAVYYCQQWSSNTLTFG | |
| | | GGTKVEIKRTVAAPSVFIFPPSDEQLKSGTASVVCLLNNFYPREAKVQW | |
| | | KVDNALQSGNSQESVTEQDSKDSTYSLSSTLTLSKADYEKHKVYACEVT | |
| | | HQGLSSPVTKSFNRGEC | |
| | 4^{th} | EIVLTQSPGTLSLSPGERATLSCRASQSVSSSYLAWYQQKPGQAPRLLI | 469 |
| | chain | YGASSRATGIPDRFSGSGSGTDFTLTISRLEPEDFAVYYCQQYGSSPWT | |
| | | FGQGTKVEIKSSASTKGPSVFPLAPSSKSTSGGTAALGCLVKDYFPEPV | |
| | | TVSWNSGALTSGVHTFPAVLQSSGLYSLSSVVTVPSSSLGTQTYICNVN | |
| | | HKPSNTKVDKKVEPKSC | |
| Ly2019 | 1^{st} | QVQLVQSGAEVKKPGASVKVSCKASGYTFTSYVMHWVRQKPGQGLEWIG | 470 |
| | chain | YINPYNEGTESTDKFKGRATMTSDKSTSTVYMELSSLRSEDTAVYYCAS | |
| | | IYYGYEGTYFGVWGQGTLVTVSSASTKGPSVFPLAPSSKSTSGGTAALG | |
| | | CLVKDYFPEPVTVSWNSGALTSGVHTFPAVLQSSGLYSLSSVVTVPSSS | |
| | | LGTQTYICNVNHKPSNTKVDKKVEPKSCDKTHTCPPCPAPEAAGPSVFL | |
| | | FPPKPKDTLMISRTPEVTCVVVDVSHEDPEVKFNWYVDGVEVHNAKTKP | |
| | | REEQYNSTYRVVSVLTVLHQDWLNGKEYKCKVSNKALPAPIEKTISKAK | |
| | | GQPREPQVYTLPPSREEMTKNQVSLWCLVKGFYPSDIAVEWESNGQPEN | |
| | | NYKTTPPVLDSDGSFFLYSKLTVDKSRWQQGNVFSCSVMHEALHNHYTQ | |
| | | KSLSLSPGGGGGSGGGGSGGGGSGGGGSEIVLTQSPGTLSLSPGERATL | |
| | | SCRASQSVSSSYLAWYQQKPGQAPRLLIYGASSRATGIPDRFSGSGSGT | |
| | | DFTLTISRLEPEDFAVYYCQQYGSSPWTFGQGTKVEIKGGGGSGGGGSG | |
| | | GGGSGGGGSQVQLQESGPGLVKPSETLSLTCTVSGGSISSYYWSWIRQP | |
| | | PGKGLEWIGYIYYSGITHYNPSLKSRVTISVDTSKIQFSLKLSSVTAAD | |
| | | TAVYYCARWGVRRDYYYYGMDVWGQGTTVTVSS | |
| | 2^{nd} | QVQLVQSGAEVKKPGASVKVSCKASGYTFTSYVMHWVRQKPGQGLEWIG | 471 |
| | chain | YINPYNEGTESTDKFKGRATMTSDKSTSTVYMELSSLRSEDTAVYYCAS | |
| | | IYYGYEGTYFGVWGQGTLVTVSSASTKGPSVFPLAPSSKSTSGGTAALG | |
| | | CLVKDYFPEPVTVSWNSGALTSGVHTFPAVLQSSGLYSLSSVVTVPSSS | |
| | | LGTQTYICNVNHKPSNTKVDKKVEPKSCGGGGSGGGGSGGGGSGGGGSE | |
| | | VQLVESGGGLVQPGGSLRLSCAASGFTFSTYAMNWVRQAPGKGLEWVGR | |
| | | IRSKYNNYATYYADSVKGRFTISRDDSKNSLYLQMNSLKTEDTAVYYCV | |
| | | RHGNFGNSYVSWFAYWGQGTLVTVSSASVAAPSVFIFPPSDEQLKSGTA | |
| | | SVVCLLNNFYPREAKVQWKVDNALQSGNSQESVTEQDSKDSTYSLSSTL | |
| | | TLSKADYEKHKVYACEVTHQGLSSPVTKSFNRGECDKTHTCPPCPAPEA | |
| | | AGPSVFLFPPKPKDTLMISRTPEVTCVVVDVSHEDPEVKFNWYVDGVEV | |
| | | HNAKTKPREEQYNSTYRVVSVLTVLHQDWLNGKEYKCKVSNKALPAPIE | |
| | | KTISKAKGQPREPQVYTLPPSREEMTKNQVSLSCAVKGFYPSDIAVEWE | |
| | | SNGQPENNYKTTPPVLDSDGSFFLVSKLTVDKSRWQQGNVFSCSVMHEA | |
| | | LHNRFTQKSLSLSPGGGGGSGGGGSGGGGSGGGGSEIVLTQSPGTLSLS | |
| | | PGERATLSCRASQSVSSSYLAWYQQKPGQAPRLLIYGASSRATGIPDRF | |
| | | SGSGSGTDFTLTISRLEPEDFAVYYCQQYGSSPWTFGQGTKVEIKGGGG | |
| | | SGGGGSGGGGSGGGGSQVQLQESGPGLVKPSETLSLTCTVSGGSISSYY | |
| | | WSWIRQPPGKGLEWIGYIYYSGITHYNPSLKSRVTISVDTSKIQFSLKL | |
| | | SSVTAADTAVYYCARWGVRRDYYYYGMDVWGQGTTVTVSS | |
| | 3^{rd} | EIVLTQSPATLSLSPGERATLSCRASSSVSYMHWYQQKPGQAPRPWIYA | 472 |
| | chain | TSNLASGIPARFSGSRSGTDYTLTISSLEPEDFAVYYCQQWSSNTLTFG | |
| | | GGTKVEIKRTVAAPSVFIFPPSDEQLKSGTASVVCLLNNFYPREAKVQW | |
| | | KVDNALQSGNSQESVTEQDSKDSTYSLSSTLTLSKADYEKHKVYACEVT | |
| | | HQGLSSPVTKSFNRGEC | |
| | 4^{th} | QAVVTQEPSLTVSPGGTVTLTCRSSTGAVTTSNYANWVQQKPGQAPRGL | 473 |
| | chain | IGGTNKRAPWTPARFSGSLLGGKAALTITGAQAEDEADYYCALWYSNLW | |
| | | VFGGGTKLTVLSSASTKGPSVFPLAPSSKSTSGGTAALGCLVKDYFPEP | |
| | | VTVSWNSGALTSGVHTFPAVLQSSGLYSLSSVVTVPSSSLGTQTYICNV | |
| | | NHKPSNTKVDKKVEPKSC | |
| Ly2020 | 1^{st} | QVQLVQSGAEVKKPGASVKVSCKASGYTFTSYVMHWVRQKPGQGLEWIG | 474 |
| | chain | YINPYNEGTESTDKFKGRATMTSDKSTSTVYMELSSLRSEDTAVYYCAS | |
| | | IYYGYEGTYFGVWGQGTLVTVSSASTKGPSVFPLAPSSKSTSGGTAALG | |
| | | CLVKDYFPEPVTVSWNSGALTSGVHTFPAVLQSSGLYSLSSVVTVPSSS | |
| | | LGTQTYICNVNHKPSNTKVDKKVEPKSCDKTHTCPPCPAPEAAGPSVFL | |
| | | FPPKPKDTLMISRTPEVTCVVVDVSHEDPEVKFNWYVDGVEVHNAKTKP | |
| | | REEQYNSTYRVVSVLTVLHQDWLNGKEYKCKVSNKALPAPIEKTISKAK | |
| | | GQPREPQVYTLPPSREEMTKNQVSLWCLVKGFYPSDIAVEWESNGQPEN | |
| | | NYKTTPPVLDSDGSFFLYSKLTVDKSRWQQGNVFSCSVMHEALHNHYTQ | |
| | | KSLSLSPGGGGGSGGGGSGGGGSGGGGSQVQLQESGPGLVKPSETLSLT | |
| | | CTVSGGSISSYYWSWIRQPPGKGLEWIGYIYYSGITHYNPSLKSRVTIS | |
| | | VDTSKIQFSLKLSSVTAADTAVYYCARWGVRRDYYYYGMDVWGQGTTVT | |
| | | VSSGGGGSGGGGSGGGGSGGGGSEIVLTQSPGTLSLSPGERATLSCRAS | |
| | | QSVSSSYLAWYQQKPGQAPRLLIYGASSRATGIPDRFSGSGSGTDFTLT | |
| | | ISRLEPEDFAVYYCQQYGSSPWTFGQGTKVEIK | |
| | 2^{nd} | QVQLVQSGAEVKKPGASVKVSCKASGYTFTSYVMHWVRQKPGQGLEWIG | 475 |
| | chain | YINPYNEGTESTDKFKGRATMTSDKSTSTVYMELSSLRSEDTAVYYCAS | |
| | | IYYGYEGTYFGVWGQGTLVTVSSASTKGPSVFPLAPSSKSTSGGTAALG | |
| | | CLVKDYFPEPVTVSWNSGALTSGVHTFPAVLQSSGLYSLSSVVTVPSSS | |
| | | LGTQTYICNVNHKPSNTKVDKKVEPKSCGGGGSGGGGSGGGGSGGGGSE | |
| | | VQLVESGGGLVQPGGSLRLSCAASGFTFSTYAMNWVRQAPGKGLEWVGR | |
| | | IRSKYNNYATYYADSVKGRFTISRDDSKNSLYLQMNSLKTEDTAVYYCV | |
| | | RHGNFGNSYVSWFAYWGQGTLVTVSSASVAAPSVFIFPPSDEQLKSGTA | |
| | | SVVCLLNNFYPREAKVQWKVDNALQSGNSQESVTEQDSKDSTYSLSSTL | |
| | | TLSKADYEKHKVYACEVTHQGLSSPVTKSFNRGECDKTHTCPPCPAPEA | |
| | | AGPSVFLFPPKPKDTLMISRTPEVTCVVVDVSHEDPEVKFNWYVDGVEV | |
| | | HNAKTKPREEQYNSTYRVVSVLTVLHQDWLNGKEYKCKVSNKALPAPIE | |
| | | KTISKAKGQPREPQVYTLPPSREEMTKNQVSLSCAVKGFYPSDIAVEWE | |
| | | SNGQPENNYKTTPPVLDSDGSFFLVSKLTVDKSRWQQGNVFSCSVMHEA | |
| | | LHNRFTQKSLSLSPGGGGGSGGGGSGGGGSGGGGSQVQLQESGPGLVKP | |
| | | SETLSLTCTVSGGSISSYYWSWIRQPPGKGLEWIGYIYYSGITHYNPSL | |
| | | KSRVTISVDTSKIQFSLKLSSVTAADTAVYYCARWGVRRDYYYYGMDVW | |
| | | GQGTTVTVSSGGGGSGGGGSGGGGSGGGGSEIVLTQSPGTLSLSPGERA | |
| | | TLSCRASQSVSSSYLAWYQQKPGQAPRLLIYGASSRATGIPDRFSGSGS | |
| | | GTDFTLTISRLEPEDFAVYYCQQYGSSPWTFGQGTKVEIK | |
| | 3^{rd} | EIVLTQSPATLSLSPGERATLSCRASSSVSYMHWYQQKPGQAPRPWIYA | 476 |
| | chain | TSNLASGIPARFSGSRSGTDYTLTISSLEPEDFAVYYCQQWSSNTLTFG | |
| | | GGTKVEIKRTVAAPSVFIFPPSDEQLKSGTASVVCLLNNFYPREAKVQW | |
| | | KVDNALQSGNSQESVTEQDSKDSTYSLSSTLTLSKADYEKHKVYACEVT | |
| | | HQGLSSPVTKSFNRGEC | |
| | 4^{th} | QAVVTQEPSLTVSPGGTVTLTCRSSTGAVTTSNYANWVQQKPGQAPRGL | 477 |
| | chain | IGGTNKRAPWTPARFSGSLLGGKAALTITGAQAEDEADYYCALWYSNLW | |
| | | VFGGGTKLTVLSSASTKGPSVFPLAPSSKSTSGGTAALGCLVKDYFPEP | |
| | | VTVSWNSGALTSGVHTFPAVLQSSGLYSLSSVVTVPSSSLGTQTYICNV | |
| | | NHKPSNTKVDKKVEPKSC | |
| Ly2021 | 1^{st} | QVQLVQSGAEVKKPGASVKVSCKASGYTFTSYVMHWVRQKPGQGLEWIG | 478 |
| | chain | YINPYNEGTESTDKFKGRATMTSDKSTSTVYMELSSLRSEDTAVYYCAS | |
| | | IYYGYEGTYFGVWGQGTLVTVSSASTKGPSVFPLAPSSKSTSGGTAALG | |
| | | CLVKDYFPEPVTVSWNSGALTSGVHTFPAVLQSSGLYSLSSVVTVPSSS | |
| | | LGTQTYICNVNHKPSNTKVDKKVEPKSCDKTHTCPPCPAPEAAGPSVFL | |
| | | FPPKPKDTLMISRTPEVTCVVVDVSHEDPEVKFNWYVDGVEVHNAKTKP | |
| | | REEQYNSTYRVVSVLTVLHQDWLNGKEYKCKVSNKALPAPIEKTISKAK | |
| | | GQPREPQVYTLPPSREEMTKNQVSLWCLVKGFYPSDIAVEWESNGQPEN | |
| | | NYKTTPPVLDSDGSFFLYSKLTVDKSRWQQGNVFSCSVMHEALHNHYTQ | |
| | | KSLSLSPGK | |
| | 2^{nd} | QVQLVQSGAEVKKPGASVKVSCKASGYTFTSYVMHWVRQKPGQGLEWIG | 479 |
| | chain | YINPYNEGTESTDKFKGRATMTSDKSTSTVYMELSSLRSEDTAVYYCAS | |
| | | IYYGYEGTYFGVWGQGTLVTVSSASTKGPSVFPLAPSSKSTSGGTAALG | |
| | | CLVKDYFPEPVTVSWNSGALTSGVHTFPAVLQSSGLYSLSSVVTVPSSS | |
| | | LGTQTYICNVNHKPSNTKVDKKVEPKSCGGGGSGGGGSGGGGSGGGGSE | |
| | | VQLVESGGGLVQPGGSLRLSCAASGFTFSTYAMNWVRQAPGKGLEWVGR | |
| | | IRSKYNNYATYYADSVKGRFTISRDDSKNSLYLQMNSLKTEDTAVYYCV | |
| | | RHGNFGNSYVSWFAYWGQGTLVTVSSASVAAPSVFIFPPSDEQLKSGTA | |
| | | SVVCLLNNFYPREAKVQWKVDNALQSGNSQESVTEQDSKDSTYSLSSTL | |
| | | TLSKADYEKHKVYACEVTHQGLSSPVTKSFNRGECDKTHTCPPCPAPEA | |
| | | AGPSVFLFPPKPKDTLMISRTPEVTCVVVDVSHEDPEVKFNWYVDGVEV | |
| | | HNAKTKPREEQYNSTYRVVSVLTVLHQDWLNGKEYKCKVSNKALPAPIE | |
| | | KTISKAKGQPREPQVYTLPPSREEMTKNQVSLSCAVKGFYPSDIAVEWE | |
| | | SNGQPENNYKTTPPVLDSDGSFFLVSKLTVDKSRWQQGNVFSCSVMHEA | |
| | | LHNRFTQKSLSLSPGGGGGSGGGGSGGGGSGGGGSEIVLTQSPGTLSLS | |
| | | PGERATLSCRASQSVSSSYLAWYQQKPGQAPRLLIYGASSRATGIPDRF | |
| | | SGSGSGTDFTLTISRLEPEDFAVYYCQQYGSSPWTFGQGTKVEIKGGGG | |
| | | SGGGGSGGGGSGGGGSQVQLQESGPGLVKPSETLSLTCTVSGGSISSYY | |
| | | WSWIRQPPGKGLEWIGYIYYSGITHYNPSLKSRVTISVDTSKIQFSLKL | |
| | | SSVTAADTAVYYCARWGVRRDYYYYGMDVWGQGTTVTVSS | |
| | 3^{rd} | EIVLTQSPATLSLSPGERATLSCRASSSVSYMHWYQQKPGQAPRPWIYA | 480 |
| | chain | TSNLASGIPARFSGSRSGTDYTLTISSLEPEDFAVYYCQQWSSNTLTFG | |
| | | GGTKVEIKRTVAAPSVFIFPPSDEQLKSGTASVVCLLNNFYPREAKVQW | |
| | | KVDNALQSGNSQESVTEQDSKDSTYSLSSTLTLSKADYEKHKVYACEVT | |
| | | HQGLSSPVTKSFNRGEC | |
| | 4^{th} | QAVVTQEPSLTVSPGGTVTLTCRSSTGAVTTSNYANWVQQKPGQAPRGL | 481 |
| | chain | IGGTNKRAPWTPARFSGSLLGGKAALTITGAQAEDEADYYCALWYSNLW | |
| | | VFGGGTKLTVLSSASTKGPSVFPLAPSSKSTSGGTAALGCLVKDYFPEP | |
| | | VTVSWNSGALTSGVHTFPAVLQSSGLYSLSSVVTVPSSSLGTQTYICNV | |
| | | NHKPSNTKVDKKVEPKSC | |
| Ly2022 | 1^{st} | QVQLVQSGAEVKKPGASVKVSCKASGYTFTSYVMHWVRQKPGQGLEWIG | 482 |
| | chain | YINPYNEGTESTDKFKGRATMTSDKSTSTVYMELSSLRSEDTAVYYCAS | |
| | | IYYGYEGTYFGVWGQGTLVTVSSASTKGPSVFPLAPSSKSTSGGTAALG | |
| | | CLVKDYFPEPVTVSWNSGALTSGVHTFPAVLQSSGLYSLSSVVTVPSSS | |
| | | LGTQTYICNVNHKPSNTKVDKKVEPKSCDKTHTCPPCPAPEAAGPSVFL | |
| | | FPPKPKDTLMISRTPEVTCVVVDVSHEDPEVKFNWYVDGVEVHNAKTKP | |
| | | REEQYNSTYRVVSVLTVLHQDWLNGKEYKCKVSNKALPAPIEKTISKAK | |
| | | GQPREPQVYTLPPSREEMTKNQVSLWCLVKGFYPSDIAVEWESNGQPEN | |
| | | NYKTTPPVLDSDGSFFLYSKLTVDKSRWQQGNVFSCSVMHEALHNHYTQ | |
| | | KSLSLSPGK | |
| | 2^{nd} | QVQLVQSGAEVKKPGASVKVSCKASGYTFTSYVMHWVRQKPGQGLEWIG | 483 |
| | chain | YINPYNEGTESTDKFKGRATMTSDKSTSTVYMELSSLRSEDTAVYYCAS | |
| | | IYYGYEGTYFGVWGQGTLVTVSSASTKGPSVFPLAPSSKSTSGGTAALG | |
| | | CLVKDYFPEPVTVSWNSGALTSGVHTFPAVLQSSGLYSLSSVVTVPSSS | |
| | | LGTQTYICNVNHKPSNTKVDKKVEPKSCGGGGSGGGGSGGGGSGGGGSE | |
| | | VQLVESGGGLVQPGGSLRLSCAASGFTFSTYAMNWVRQAPGKGLEWVGR | |
| | | IRSKYNNYATYYADSVKGRFTISRDDSKNSLYLQMNSLKTEDTAVYYCV | |
| | | RHGNFGNSYVSWFAYWGQGTLVTVSSASVAAPSVFIFPPSDEQLKSGTA | |
| | | SVVCLLNNFYPREAKVQWKVDNALQSGNSQESVTEQDSKDSTYSLSSTL | |
| | | TLSKADYEKHKVYACEVTHQGLSSPVTKSFNRGECDKTHTCPPCPAPEA | |
| | | AGPSVFLFPPKPKDTLMISRTPEVTCVVVDVSHEDPEVKFNWYVDGVEV | |
| | | HNAKTKPREEQYNSTYRVVSVLTVLHQDWLNGKEYKCKVSNKALPAPIE | |
| | | KTISKAKGQPREPQVYTLPPSREEMTKNQVSLSCAVKGFYPSDIAVEWE | |
| | | SNGQPENNYKTTPPVLDSDGSFFLVSKLTVDKSRWQQGNVFSCSVMHEA | |
| | | LHNRFTQKSLSLSPGGGGGSGGGGSGGGGSGGGGSQVQLQESGPGLVKP | |
| | | SETLSLTCTVSGGSISSYYWSWIRQPPGKGLEWIGYIYYSGITHYNPSL | |
| | | KSRVTISVDTSKIQFSLKLSSVTAADTAVYYCARWGVRRDYYYYGMDVW | |
| | | GQGTTVTVSSGGGGSGGGGSGGGGSGGGGSEIVLTQSPGTLSLSPGERA | |
| | | TLSCRASQSVSSSYLAWYQQKPGQAPRLLIYGASSRATGIPDRFSGSGS | |
| | | GTDFTLTISRLEPEDFAVYYCQQYGSSPWTFGQGTKVEIK | |
| | 3^{rd} | EIVLTQSPATLSLSPGERATLSCRASSSVSYMHWYQQKPGQAPRPWIYA | 484 |
| | chain | TSNLASGIPARFSGSRSGTDYTLTISSLEPEDFAVYYCQQWSSNTLTFG | |
| | | GGTKVEIKRTVAAPSVFIFPPSDEQLKSGTASVVCLLNNFYPREAKVQW | |
| | | KVDNALQSGNSQESVTEQDSKDSTYSLSSTLTLSKADYEKHKVYACEVT | |
| | | HQGLSSPVTKSFNRGEC | |
| | 4^{th} | QAVVTQEPSLTVSPGGTVTLTCRSSTGAVTTSNYANWVQQKPGQAPRGL | 485 |
| | chain | IGGTNKRAPWTPARFSGSLLGGKAALTITGAQAEDEADYYCALWYSNLW | |
| | | VFGGGTKLTVLSSASTKGPSVFPLAPSSKSTSGGTAALGCLVKDYFPEP | |
| | | VTVSWNSGALTSGVHTFPAVLQSSGLYSLSSVVTVPSSSLGTQTYICNV | |
| | | NHKPSNTKVDKKVEPKSC | |
| Ly2023 | 1^{st} | QVQLVQSGAEVKKPGASVKVSCKASGYTFTSYVMHWVRQKPGQGLEWIG | 486 |
| | chain | YINPYNEGTESTDKFKGRATMTSDKSTSTVYMELSSLRSEDTAVYYCAS | |
| | | IYYGYEGTYFGVWGQGTLVTVSSASTKGPSVFPLAPSSKSTSGGTAALG | |
| | | CLVKDYFPEPVTVSWNSGALTSGVHTFPAVLQSSGLYSLSSVVTVPSSS | |
| | | LGTQTYICNVNHKPSNTKVDKKVEPKSCDKTHTCPPCPAPEAAGPSVFL | |
| | | FPPKPKDTLMISRTPEVTCVVVDVSHEDPEVKFNWYVDGVEVHNAKTKP | |
| | | REEQYNSTYRVVSVLTVLHQDWLNGKEYKCKVSNKALPAPIEKTISKAK | |
| | | GQPREPQVYTLPPSREEMTKNQVSLWCLVKGFYPSDIAVEWESNGQPEN | |
| | | NYKTTPPVLDSDGSFFLYSKLTVDKSRWQQGNVFSCSVMHEALHNHYTQ | |
| | | KSLSLSPGGGGGSGGGGSGGGGSGGGGSEIVLTQSPGTLSLSPGERATL | |
| | | SCRASQSVSSSYLAWYQQKPGQAPRLLIYGASSRATGIPDRFSGSGSGT | |
| | | DFTLTISRLEPEDFAVYYCQQYGSSPWTFGQGTKVEIKGGGGSGGGGSG | |
| | | GGGSGGGGSQVQLQESGPGLVKPSETLSLTCTVSGGSISSYYWSWIRQP | |
| | | PGKGLEWIGYIYYSGITHYNPSLKSRVTISVDTSKIQFSLKLSSVTAAD | |
| | | TAVYYCARWGVRRDYYYYGMDVWGQGTTVTVSS | |
| | 2^{nd} | QVQLVQSGAEVKKPGASVKVSCKASGYTFTSYVMHWVRQKPGQGLEWIG | 487 |
| | chain | YINPYNEGTESTDKFKGRATMTSDKSTSTVYMELSSLRSEDTAVYYCAS | |
| | | IYYGYEGTYFGVWGQGTLVTVSSASTKGPSVFPLAPSSKSTSGGTAALG | |
| | | CLVKDYFPEPVTVSWNSGALTSGVHTFPAVLQSSGLYSLSSVVTVPSSS | |
| | | LGTQTYICNVNHKPSNTKVDKKVEPKSCGGGGSGGGGSGGGGSGGGGSE | |
| | | VQLVESGGGLVQPGGSLRLSCAASGFTFSTYAMNWVRQAPGKGLEWVGR | |
| | | IRSKYNNYATYYADSVKGRFTISRDDSKNSLYLQMNSLKTEDTAVYYCV | |
| | | RHGNFGNSYVSWFAYWGQGTLVTVSSASVAAPSVFIFPPSDEQLKSGTA | |
| | | SVVCLLNNFYPREAKVQWKVDNALQSGNSQESVTEQDSKDSTYSLSSTL | |
| | | TLSKADYEKHKVYACEVTHQGLSSPVTKSFNRGECDKTHTCPPCPAPEA | |
| | | AGPSVFLFPPKPKDTLMISRTPEVTCVVVDVSHEDPEVKFNWYVDGVEV | |
| | | HNAKTKPREEQYNSTYRVVSVLTVLHQDWLNGKEYKCKVSNKALPAPIE | |
| | | KTISKAKGQPREPQVYTLPPSREEMTKNQVSLSCAVKGFYPSDIAVEWE | |
| | | SNGQPENNYKTTPPVLDSDGSFFLVSKLTVDKSRWQQGNVFSCSVMHEA | |
| | | LHNRFTQKSLSLSPGK | |
| | 3^{rd} | EIVLTQSPATLSLSPGERATLSCRASSSVSYMHWYQQKPGQAPRPWIYA | 488 |
| | chain | TSNLASGIPARFSGSRSGTDYTLTISSLEPEDFAVYYCQQWSSNTLTFG | |
| | | GGTKVEIKRTVAAPSVFIFPPSDEQLKSGTASVVCLLNNFYPREAKVQW | |
| | | KVDNALQSGNSQESVTEQDSKDSTYSLSSTLTLSKADYEKHKVYACEVT | |
| | | HQGLSSPVTKSFNRGEC | |
| | 4^{th} | QAVVTQEPSLTVSPGGTVTLTCRSSTGAVTTSNYANWVQQKPGQAPRGL | 489 |
| | chain | IGGTNKRAPWTPARFSGSLLGGKAALTITGAQAEDEADYYCALWYSNLW | |
| | | VFGGGTKLTVLSSASTKGPSVFPLAPSSKSTSGGTAALGCLVKDYFPEP | |
| | | VTVSWNSGALTSGVHTFPAVLQSSGLYSLSSVVTVPSSSLGTQTYICNV | |
| | | NHKPSNTKVDKKVEPKSC | |
| Ly2024 | 1^{st} | QVQLVQSGAEVKKPGASVKVSCKASGYTFTSYVMHWVRQKPGQGLEWIG | 490 |
| | chain | YINPYNEGTESTDKFKGRATMTSDKSTSTVYMELSSLRSEDTAVYYCAS | |
| | | IYYGYEGTYFGVWGQGTLVTVSSASTKGPSVFPLAPSSKSTSGGTAALG | |
| | | CLVKDYFPEPVTVSWNSGALTSGVHTFPAVLQSSGLYSLSSVVTVPSSS | |
| | | LGTQTYICNVNHKPSNTKVDKKVEPKSCDKTHTCPPCPAPEAAGPSVFL | |
| | | FPPKPKDTLMISRTPEVTCVVVDVSHEDPEVKFNWYVDGVEVHNAKTKP | |
| | | REEQYNSTYRVVSVLTVLHQDWLNGKEYKCKVSNKALPAPIEKTISKAK | |
| | | GQPREPQVYTLPPSREEMTKNQVSLWCLVKGFYPSDIAVEWESNGQPEN | |
| | | NYKTTPPVLDSDGSFFLYSKLTVDKSRWQQGNVFSCSVMHEALHNHYTQ | |
| | | KSLSLSPGGGGGSGGGGSGGGGSGGGGSQVQLQESGPGLVKPSETLSLT | |
| | | CTVSGGSISSYYWSWIRQPPGKGLEWIGYIYYSGITHYNPSLKSRVTIS | |
| | | VDTSKIQFSLKLSSVTAADTAVYYCARWGVRRDYYYYGMDVWGQGTTVT | |
| | | VSSGGGGSGGGGSGGGGSGGGGSEIVLTQSPGTLSLSPGERATLSCRAS | |
| | | QSVSSSYLAWYQQKPGQAPRLLIYGASSRATGIPDRFSGSGSGTDFTLT | |
| | | ISRLEPEDFAVYYCQQYGSSPWTFGQGTKVEIK | |
| | 2^{nd} | QVQLVQSGAEVKKPGASVKVSCKASGYTFTSYVMHWVRQKPGQGLEWIG | 491 |
| | chain | YINPYNEGTESTDKFKGRATMTSDKSTSTVYMELSSLRSEDTAVYYCAS | |
| | | IYYGYEGTYFGVWGQGTLVTVSSASTKGPSVFPLAPSSKSTSGGTAALG | |
| | | CLVKDYFPEPVTVSWNSGALTSGVHTFPAVLQSSGLYSLSSVVTVPSSS | |
| | | LGTQTYICNVNHKPSNTKVDKKVEPKSCGGGGSGGGGSGGGGSGGGGSE | |
| | | VQLVESGGGLVQPGGSLRLSCAASGFTFSTYAMNWVRQAPGKGLEWVGR | |
| | | IRSKYNNYATYYADSVKGRFTISRDDSKNSLYLQMNSLKTEDTAVYYCV | |
| | | RHGNFGNSYVSWFAYWGQGTLVTVSSASVAAPSVFIFPPSDEQLKSGTA | |
| | | SVVCLLNNFYPREAKVQWKVDNALQSGNSQESVTEQDSKDSTYSLSSTL | |
| | | TLSKADYEKHKVYACEVTHQGLSSPVTKSFNRGECDKTHTCPPCPAPEA | |
| | | AGPSVFLFPPKPKDTLMISRTPEVTCVVVDVSHEDPEVKFNWYVDGVEV | |
| | | HNAKTKPREEQYNSTYRVVSVLTVLHQDWLNGKEYKCKVSNKALPAPIE | |
| | | KTISKAKGQPREPQVYTLPPSREEMTKNQVSLSCAVKGFYPSDIAVEWE | |
| | | SNGQPENNYKTTPPVLDSDGSFFLVSKLTVDKSRWQQGNVFSCSVMHEA | |
| | | LHNRFTQKSLSLSPGK | |
| | 3^{rd} | EIVLTQSPATLSLSPGERATLSCRASSSVSYMHWYQQKPGQAPRPWIYA | 492 |
| | chain | TSNLASGIPARFSGSRSGTDYTLTISSLEPEDFAVYYCQQWSSNTLTFG | |
| | | GGTKVEIKRTVAAPSVFIFPPSDEQLKSGTASVVCLLNNFYPREAKVQW | |
| | | KVDNALQSGNSQESVTEQDSKDSTYSLSSTLTLSKADYEKHKVYACEVT | |
| | | HQGLSSPVTKSFNRGEC | |
| | 4^{th} | QAVVTQEPSLTVSPGGTVTLTCRSSTGAVTTSNYANWVQQKPGQAPRGL | 493 |
| | chain | IGGTNKRAPWTPARFSGSLLGGKAALTITGAQAEDEADYYCALWYSNLW | |
| | | VFGGGTKLTVLSSASTKGPSVFPLAPSSKSTSGGTAALGCLVKDYFPEP | |
| | | VTVSWNSGALTSGVHTFPAVLQSSGLYSLSSVVTVPSSSLGTQTYICNV | |
| | | NHKPSNTKVDKKVEPKSC | |
| Ly2025 | 1^{st} | QVQLVQSGAEVKKPGASVKVSCKASGYTFTSYVMHWVRQKPGQGLEWIG | 494 |
| | chain | YINPYNEGTESTDKFKGRATMTSDKSTSTVYMELSSLRSEDTAVYYCAS | |
| | | IYYGYEGTYFGVWGQGTLVTVSSASTKGPSVFPLAPSSKSTSGGTAALG | |
| | | CLVKDYFPEPVTVSWNSGALTSGVHTFPAVLQSSGLYSLSSVVTVPSSS | |
| | | LGTQTYICNVNHKPSNTKVDKKVEPKSCDKTHTCPPCPAPEAAGPSVFL | |
| | | FPPKPKDTLMISRTPEVTCVVVDVSHEDPEVKFNWYVDGVEVHNAKTKP | |
| | | REEQYNSTYRVVSVLTVLHQDWLNGKEYKCKVSNKALPAPIEKTISKAK | |
| | | GQPREPQVYTLPPSREEMTKNQVSLWCLVKGFYPSDIAVEWESNGQPEN | |
| | | NYKTTPPVLDSDGSFFLYSKLTVDKSRWQQGNVFSCSVMHEALHNHYTQ | |
| | | KSLSLSPGGGGGSGGGGSGGGGSGGGGSQVQLQESGPGLVKPSETLSLT | |
| | | CTVSGGSISSYYWSWIRQPPGKGLEWIGYIYYSGITHYNPSLKSRVTIS | |
| | | VDTSKIQFSLKLSSVTAADTAVYYCARWGVRRDYYYYGMDVWGQGTTVT | |
| | | VSS | |
| | 2^{nd} | QVQLVQSGAEVKKPGASVKVSCKASGYTFTSYVMHWVRQKPGQGLEWIG | 495 |
| | chain | YINPYNEGTESTDKFKGRATMTSDKSTSTVYMELSSLRSEDTAVYYCAS | |
| | | IYYGYEGTYFGVWGQGTLVTVSSASTKGPSVFPLAPSSKSTSGGTAALG | |
| | | CLVKDYFPEPVTVSWNSGALTSGVHTFPAVLQSSGLYSLSSVVTVPSSS | |
| | | LGTQTYICNVNHKPSNTKVDKKVEPKSCGGGGSGGGGSGGGGSGGGGSE | |
| | | VQLVESGGGLVQPGGSLRLSCAASGFTFSTYAMNWVRQAPGKGLEWVGR | |
| | | IRSKYNNYATYYADSVKGRFTISRDDSKNSLYLQMNSLKTEDTAVYYCV | |
| | | RHGNFGNSYVSWFAYWGQGTLVTVSSASVAAPSVFIFPPSDEQLKSGTA | |
| | | SVVCLLNNFYPREAKVQWKVDNALQSGNSQESVTEQDSKDSTYSLSSTL | |
| | | TLSKADYEKHKVYACEVTHQGLSSPVTKSFNRGECDKTHTCPPCPAPEA | |
| | | AGPSVFLFPPKPKDTLMISRTPEVTCVVVDVSHEDPEVKFNWYVDGVEV | |
| | | HNAKTKPREEQYNSTYRVVSVLTVLHQDWLNGKEYKCKVSNKALPAPIE | |
| | | KTISKAKGQPREPQVYTLPPSREEMTKNQVSLSCAVKGFYPSDIAVEWE | |
| | | SNGQPENNYKTTPPVLDSDGSFFLVSKLTVDKSRWQQGNVFSCSVMHEA | |
| | | LHNRFTQKSLSLSPGGGGGSGGGGSGGGGSGGGGSEIVLTQSPGTLSLS | |
| | | PGERATLSCRASQSVSSSYLAWYQQKPGQAPRLLIYGASSRATGIPDRF | |
| | | SGSGSGTDFTLTISRLEPEDFAVYYCQQYGSSPWTFGQGTKVEIK | |
| | 3^{rd} | EIVLTQSPATLSLSPGERATLSCRASSSVSYMHWYQQKPGQAPRPWIYA | 496 |
| | chain | TSNLASGIPARFSGSRSGTDYTLTISSLEPEDFAVYYCQQWSSNTLTFG | |
| | | GGTKVEIKRTVAAPSVFIFPPSDEQLKSGTASVVCLLNNFYPREAKVQW | |
| | | KVDNALQSGNSQESVTEQDSKDSTYSLSSTLTLSKADYEKHKVYACEVT | |
| | | HQGLSSPVTKSFNRGEC | |
| | 4^{th} | QAVVTQEPSLTVSPGGTVTLTCRSSTGAVTTSNYANWVQQKPGQAPRGL | 497 |
| | chain | IGGTNKRAPWTPARFSGSLLGGKAALTITGAQAEDEADYYCALWYSNLW | |
| | | VFGGGTKLTVLSSASTKGPSVFPLAPSSKSTSGGTAALGCLVKDYFPEP | |
| | | VTVSWNSGALTSGVHTFPAVLQSSGLYSLSSVVTVPSSSLGTQTYICNV | |
| | | NHKPSNTKVDKKVEPKSC | |
| Ly2026 | 1^{st} | QVQLVQSGAEVKKPGASVKVSCKASGYTFTSYVMHWVRQKPGQGLEWIG | 498 |
| | chain | YINPYNEGTESTDKFKGRATMTSDKSTSTVYMELSSLRSEDTAVYYCAS | |
| | | IYYGYEGTYFGVWGQGTLVTVSSASTKGPSVFPLAPSSKSTSGGTAALG | |
| | | CLVKDYFPEPVTVSWNSGALTSGVHTFPAVLQSSGLYSLSSVVTVPSSS | |
| | | LGTQTYICNVNHKPSNTKVDKKVEPKSCDKTHTCPPCPAPEAAGPSVEL | |
| | | FPPKPKDTLMISRTPEVTCVVVDVSHEDPEVKFNWYVDGVEVHNAKTKP | |
| | | REEQYNSTYRVVSVLTVLHQDWLNGKEYKCKVSNKALPAPIEKTISKAK | |
| | | GQPREPQVYTLPPSREEMTKNQVSLWCLVKGFYPSDIAVEWESNGQPEN | |
| | | NYKTTPPVLDSDGSFFLYSKLTVDKSRWQQGNVFSCSVMHEALHNHYTQ | |
| | | KSLSLSPGGGGGSGGGGSGGGGSGGGGSEIVLTQSPGTLSLSPGERATL | |
| | | SCRASQSVSSSYLAWYQQKPGQAPRLLIYGASSRATGIPDRFSGSGSGT | |
| | | DFTLTISRLEPEDFAVYYCQQYGSSPWTFGQGTKVEIKGGGGSGGGGSG | |
| | | GGGSGGGGSQVQLQESGPGLVKPSETLSLTCTVSGGSISSYYWSWIRQP | |
| | | PGKGLEWIGYIYYSGITHYNPSLKSRVTISVDTSKIQFSLKLSSVTAAD | |
| | | TAVYYCARWGVRRDYYYYGMDVWGQGTTVTVSS | |
| | 2^{nd} | QVQLVQSGAEVKKPGASVKVSCKASGYTFTSYVMHWVRQKPGQGLEWIG | 499 |
| | chain | YINPYNEGTESTDKFKGRATMTSDKSTSTVYMELSSLRSEDTAVYYCAS | |
| | | IYYGYEGTYFGVWGQGTLVTVSSASTKGPSVFPLAPSSKSTSGGTAALG | |
| | | CLVKDYFPEPVTVSWNSGALTSGVHTFPAVLQSSGLYSLSSVVTVPSSS | |
| | | LGTQTYICNVNHKPSNTKVDKKVEPKSCGGGGSGGGGSGGGGSGGGGSQ | |
| | | AVVTQEPSLTVSPGGTVTLTCRSSTGAVTTSNYANWVQQKPGQAPRGLI | |
| | | GGTNKRAPWTPARFSGSLLGGKAALTITGAQAEDEADYYCALWYSNLWV | |
| | | FGGGTKLTVLGGGGSGGGGSGGGGSGGGGSEVQLVESGGGLVQPGGSLR | |
| | | LSCAASGFTFSTYAMNWVRQAPGKGLEWVGRIRSKYNNYATYYADSVKG | |
| | | RFTISRDDSKNSLYLQMNSLKTEDTAVYYCVRHGNFGNSYVSWFAYWGQ | |
| | | GTLVTVSSDKTHTCPPCPAPEAAGPSVFLFPPKPKDTLMISRTPEVTCV | |
| | | VVDVSHEDPEVKFNWYVDGVEVHNAKTKPREEQYNSTYRVVSVLTVLHQ | |
| | | DWLNGKEYKCKVSNKALPAPIEKTISKAKGQPREPQVYTLPPSREEMTK | |
| | | NQVSLSCAVKGFYPSDIAVEWESNGQPENNYKTTPPVLDSDGSFFLVSK | |
| | | LTVDKSRWQQGNVFSCSVMHEALHNRFTQKSLSLSPGK | |
| | 3^{rd} | EIVLTQSPATLSLSPGERATLSCRASSSVSYMHWYQQKPGQAPRPWIYA | 500 |
| | chain | TSNLASGIPARFSGSRSGTDYTLTISSLEPEDFAVYYCQQWSSNTLTFG | |
| | | GGTKVEIKRTVAAPSVFIFPPSDEQLKSGTASVVCLLNNFYPREAKVQW | |
| | | KVDNALQSGNSQESVTEQDSKDSTYSLSSTLTLSKADYEKHKVYACEVT | |
| | | HQGLSSPVTKSFNRGEC | |
| Ly2027 | 1^{st} | QVQLVQSGAEVKKPGASVKVSCKASGYTFTSYVMHWVRQKPGQGLEWIG | 501 |
| | chain | YINPYNEGTESTDKFKGRATMTSDKSTSTVYMELSSLRSEDTAVYYCAS | |
| | | IYYGYEGTYFGVWGQGTLVTVSSASTKGPSVFPLAPSSKSTSGGTAALG | |
| | | CLVKDYFPEPVTVSWNSGALTSGVHTFPAVLQSSGLYSLSSVVTVPSSS | |
| | | LGTQTYICNVNHKPSNTKVDKKVEPKSCDKTHTCPPCPAPEAAGPSVFL | |
| | | FPPKPKDTLMISRTPEVTCVVVDVSHEDPEVKFNWYVDGVEVHNAKTKP | |
| | | REEQYNSTYRVVSVLTVLHQDWLNGKEYKCKVSNKALPAPIEKTISKAK | |
| | | GQPREPQVYTLPPSREEMTKNQVSLWCLVKGFYPSDIAVEWESNGQPEN | |
| | | NYKTTPPVLDSDGSFFLYSKLTVDKSRWQQGNVFSCSVMHEALHNHYTQ | |
| | | KSLSLSPGGGGGSGGGGSGGGGSGGGGSQVQLQESGPGLVKPSETLSLT | |
| | | CTVSGGSISSYYWSWIRQPPGKGLEWIGYIYYSGITHYNPSLKSRVTIS | |
| | | VDTSKIQFSLKLSSVTAADTAVYYCARWGVRRDYYYYGMDVWGQGTTVT | |
| | | VSSGGGGSGGGGSGGGGSGGGGSEIVLTQSPGTLSLSPGERATLSCRAS | |
| | | QSVSSSYLAWYQQKPGQAPRLLIYGASSRATGIPDRFSGSGSGTDFTLT | |
| | | ISRLEPEDFAVYYCQQYGSSPWTFGQGTKVEIK | |
| | 2^{nd} | QVQLVQSGAEVKKPGASVKVSCKASGYTFTSYVMHWVRQKPGQGLEWIG | 502 |
| | chain | YINPYNEGTESTDKFKGRATMTSDKSTSTVYMELSSLRSEDTAVYYCAS | |
| | | IYYGYEGTYFGVWGQGTLVTVSSASTKGPSVFPLAPSSKSTSGGTAALG | |
| | | CLVKDYFPEPVTVSWNSGALTSGVHTFPAVLQSSGLYSLSSVVTVPSSS | |
| | | LGTQTYICNVNHKPSNTKVDKKVEPKSCGGGGSGGGGSGGGGSGGGGSQ | |
| | | AVVTQEPSLTVSPGGTVTLTCRSSTGAVTTSNYANWVQQKPGQAPRGLI | |
| | | GGTNKRAPWTPARFSGSLLGGKAALTITGAQAEDEADYYCALWYSNLWV | |
| | | FGGGTKLTVLGGGGSGGGGSGGGGSGGGGSEVQLVESGGGLVQPGGSLR | |
| | | LSCAASGFTFSTYAMNWVRQAPGKGLEWVGRIRSKYNNYATYYADSVKG | |
| | | RFTISRDDSKNSLYLQMNSLKTEDTAVYYCVRHGNFGNSYVSWFAYWGQ | |
| | | GTLVTVSSDKTHTCPPCPAPEAAGPSVFLFPPKPKDTLMISRTPEVTCV | |
| | | VVDVSHEDPEVKFNWYVDGVEVHNAKTKPREEQYNSTYRVVSVLTVLHQ | |
| | | DWLNGKEYKCKVSNKALPAPIEKTISKAKGQPREPQVYTLPPSREEMTK | |
| | | NQVSLSCAVKGFYPSDIAVEWESNGQPENNYKTTPPVLDSDGSFFLVSK | |
| | | LTVDKSRWQQGNVFSCSVMHEALHNRFTQKSLSLSPGK | |
| | 3^{rd} | EIVLTQSPATLSLSPGERATLSCRASSSVSYMHWYQQKPGQAPRPWIYA | 503 |
| | chain | TSNLASGIPARFSGSRSGTDYTLTISSLEPEDFAVYYCQQWSSNTLTFG | |
| | | GGTKVEIKRTVAAPSVFIFPPSDEQLKSGTASVVCLLNNFYPREAKVQW | |
| | | KVDNALQSGNSQESVTEQDSKDSTYSLSSTLTLSKADYEKHKVYACEVT | |
| | | HQGLSSPVTKSFNRGEC | |
| Ly2028 | 1^{st} | QVQLVQSGAEVKKPGASVKVSCKASGYTFTSYVMHWVRQKPGQGLEWIG | 504 |
| | chain | YINPYNEGTESTDKFKGRATMTSDKSTSTVYMELSSLRSEDTAVYYCAS | |
| | | IYYGYEGTYFGVWGQGTLVTVSSASTKGPSVFPLAPSSKSTSGGTAALG | |
| | | CLVKDYFPEPVTVSWNSGALTSGVHTFPAVLQSSGLYSLSSVVTVPSSS | |
| | | LGTQTYICNVNHKPSNTKVDKKVEPKSCDKTHTCPPCPAPEAAGPSVFL | |
| | | FPPKPKDTLMISRTPEVTCVVVDVSHEDPEVKFNWYVDGVEVHNAKTKP | |
| | | REEQYNSTYRVVSVLTVLHQDWLNGKEYKCKVSNKALPAPIEKTISKAK | |
| | | GQPREPQVYTLPPSREEMTKNQVSLWCLVKGFYPSDIAVEWESNGQPEN | |
| | | NYKTTPPVLDSDGSFFLYSKLTVDKSRWQQGNVFSCSVMHEALHNHYTQ | |
| | | KSLSLSPGGGGGSGGGGSGGGGSGGGGSEIVLTQSPGTLSLSPGERATL | |
| | | SCRASQSVSSSYLAWYQQKPGQAPRLLIYGASSRATGIPDRFSGSGSGT | |
| | | DFTLTISRLEPEDFAVYYCQQYGSSPWTFGQGTKVEIKGGGGSGGGGSG | |
| | | GGGSGGGGSQVQLQESGPGLVKPSETLSLTCTVSGGSISSYYWSWIRQP | |
| | | PGKGLEWIGYIYYSGITHYNPSLKSRVTISVDTSKIQFSLKLSSVTAAD | |
| | | TAVYYCARWGVRRDYYYYGMDVWGQGTTVTVSS | |
| | 2^{nd} | QVQLVQSGAEVKKPGASVKVSCKASGYTFTSYVMHWVRQKPGQGLEWIG | 505 |
| | chain | YINPYNEGTESTDKFKGRATMTSDKSTSTVYMELSSLRSEDTAVYYCAS | |
| | | IYYGYEGTYFGVWGQGTLVTVSSASTKGPSVFPLAPSSKSTSGGTAALG | |
| | | CLVKDYFPEPVTVSWNSGALTSGVHTFPAVLQSSGLYSLSSVVTVPSSS | |
| | | LGTQTYICNVNHKPSNTKVDKKVEPKSCGGGGSGGGGSGGGGSGGGGSQ | |
| | | AVVTQEPSLTVSPGGTVTLTCRSSTGAVTTSNYANWVQQKPGQAPRGLI | |
| | | GGTNKRAPWTPARFSGSLLGGKAALTITGAQAEDEADYYCALWYSNLWV | |
| | | FGGGTKLTVLGGGGSGGGGSGGGGSGGGGSEVQLVESGGGLVQPGGSLR | |
| | | LSCAASGFTFSTYAMNWVRQAPGKGLEWVGRIRSKYNNYATYYADSVKG | |
| | | RFTISRDDSKNSLYLQMNSLKTEDTAVYYCVRHGNFGNSYVSWFAYWGQ | |
| | | GTLVTVSSDKTHTCPPCPAPEAAGPSVFLFPPKPKDTLMISRTPEVTCV | |
| | | VVDVSHEDPEVKFNWYVDGVEVHNAKTKPREEQYNSTYRVVSVLTVLHQ | |
| | | DWLNGKEYKCKVSNKALPAPIEKTISKAKGQPREPQVYTLPPSREEMTK | |
| | | NQVSLSCAVKGFYPSDIAVEWESNGQPENNYKTTPPVLDSDGSFFLVSK | |
| | | LTVDKSRWQQGNVFSCSVMHEALHNRFTQKSLSLSPGGGGGSGGGGSGG | |
| | | GGSGGGGSEIVLTQSPGTLSLSPGERATLSCRASQSVSSSYLAWYQQKP | |
| | | GQAPRLLIYGASSRATGIPDRFSGSGSGTDFTLTISRLEPEDFAVYYCQ | |
| | | QYGSSPWTFGQGTKVEIKGGGGSGGGGSGGGGSGGGGSQVQLQESGPGL | |
| | | VKPSETLSLTCTVSGGSISSYYWSWIRQPPGKGLEWIGYIYYSGITHYN | |
| | | PSLKSRVTISVDTSKIQFSLKLSSVTAADTAVYYCARWGVRRDYYYYGM | |
| | | DVWGQGTTVTVSS | |
| | 3^{rd} | EIVLTQSPATLSLSPGERATLSCRASSSVSYMHWYQQKPGQAPRPWIYA | 506 |
| | chain | TSNLASGIPARFSGSRSGTDYTLTISSLEPEDFAVYYCQQWSSNTLTFG | |
| | | GGTKVEIKRTVAAPSVFIFPPSDEQLKSGTASVVCLLNNFYPREAKVQW | |
| | | KVDNALQSGNSQESVTEQDSKDSTYSLSSTLTLSKADYEKHKVYACEVT | |
| | | HQGLSSPVTKSFNRGEC | |
| Ly2029 | 1^{st} | QVQLVQSGAEVKKPGASVKVSCKASGYTFTSYVMHWVRQKPGQGLEWIG | 507 |
| | chain | YINPYNEGTESTDKFKGRATMTSDKSTSTVYMELSSLRSEDTAVYYCAS | |
| | | IYYGYEGTYFGVWGQGTLVTVSSASTKGPSVFPLAPSSKSTSGGTAALG | |
| | | CLVKDYFPEPVTVSWNSGALTSGVHTFPAVLQSSGLYSLSSVVTVPSSS | |
| | | LGTQTYICNVNHKPSNTKVDKKVEPKSCDKTHTCPPCPAPEAAGPSVFL | |
| | | FPPKPKDTLMISRTPEVTCVVVDVSHEDPEVKFNWYVDGVEVHNAKTKP | |
| | | REEQYNSTYRVVSVLTVLHQDWLNGKEYKCKVSNKALPAPIEKTISKAK | |
| | | GQPREPQVYTLPPSREEMTKNQVSLWCLVKGFYPSDIAVEWESNGQPEN | |
| | | NYKTTPPVLDSDGSFFLYSKLTVDKSRWQQGNVFSCSVMHEALHNHYTQ | |
| | | KSLSLSPGGGGGSGGGGSGGGGSGGGGSQVQLQESGPGLVKPSETLSLT | |
| | | CTVSGGSISSYYWSWIRQPPGKGLEWIGYIYYSGITHYNPSLKSRVTIS | |
| | | VDTSKIQFSLKLSSVTAADTAVYYCARWGVRRDYYYYGMDVWGQGTTVT | |
| | | VSSGGGGSGGGGSGGGGSGGGGSEIVLTQSPGTLSLSPGERATLSCRAS | |
| | | QSVSSSYLAWYQQKPGQAPRLLIYGASSRATGIPDRFSGSGSGTDFTLT | |
| | | ISRLEPEDFAVYYCQQYGSSPWTFGQGTKVEIK | |
| | 2^{nd} | QVQLVQSGAEVKKPGASVKVSCKASGYTFTSYVMHWVRQKPGQGLEWIG | 508 |
| | chain | YINPYNEGTESTDKFKGRATMTSDKSTSTVYMELSSLRSEDTAVYYCAS | |
| | | IYYGYEGTYFGVWGQGTLVTVSSASTKGPSVFPLAPSSKSTSGGTAALG | |
| | | CLVKDYFPEPVTVSWNSGALTSGVHTFPAVLQSSGLYSLSSVVTVPSSS | |
| | | LGTQTYICNVNHKPSNTKVDKKVEPKSCGGGGSGGGGSGGGGSGGGGSQ | |
| | | AVVTQEPSLTVSPGGTVTLTCRSSTGAVTTSNYANWVQQKPGQAPRGLI | |
| | | GGTNKRAPWTPARFSGSLLGGKAALTITGAQAEDEADYYCALWYSNLWV | |
| | | FGGGTKLTVLGGGGSGGGGSGGGGSGGGGSEVQLVESGGGLVQPGGSLR | |
| | | LSCAASGFTFSTYAMNWVRQAPGKGLEWVGRIRSKYNNYATYYADSVKG | |
| | | RFTISRDDSKNSLYLQMNSLKTEDTAVYYCVRHGNFGNSYVSWFAYWGQ | |
| | | GTLVTVSSDKTHTCPPCPAPEAAGPSVFLFPPKPKDTLMISRTPEVTCV | |
| | | VVDVSHEDPEVKFNWYVDGVEVHNAKTKPREEQYNSTYRVVSVLTVLHQ | |
| | | DWLNGKEYKCKVSNKALPAPIEKTISKAKGQPREPQVYTLPPSREEMTK | |
| | | NQVSLSCAVKGFYPSDIAVEWESNGQPENNYKTTPPVLDSDGSFFLVSK | |
| | | LTVDKSRWQQGNVFSCSVMHEALHNRFTQKSLSLSPGGGGGSGGGGSGG | |
| | | GGSGGGGSQVQLQESGPGLVKPSETLSLTCTVSGGSISSYYWSWIRQPP | |
| | | GKGLEWIGYIYYSGITHYNPSLKSRVTISVDTSKIQFSLKLSSVTAADT | |
| | | AVYYCARWGVRRDYYYYGMDVWGQGTTVTVSSGGGGSGGGGSGGGGSGG | |
| | | GGSEIVLTQSPGTLSLSPGERATLSCRASQSVSSSYLAWYQQKPGQAPR | |
| | | LLIYGASSRATGIPDRFSGSGSGTDFTLTISRLEPEDFAVYYCQQYGSS | |
| | | PWTFGQGTKVEIK | |
| | 3^{rd} | EIVLTQSPATLSLSPGERATLSCRASSSVSYMHWYQQKPGQAPRPWIYA | 509 |
| | chain | TSNLASGIPARFSGSRSGTDYTLTISSLEPEDFAVYYCQQWSSNTLTFG | |
| | | GGTKVEIKRTVAAPSVFIFPPSDEQLKSGTASVVCLLNNFYPREAKVQW | |
| | | KVDNALQSGNSQESVTEQDSKDSTYSLSSTLTLSKADYEKHKVYACEVT | |
| | | HQGLSSPVTKSFNRGEC | |
| Ly2030 | 1^{st} | QVQLVQSGAEVKKPGASVKVSCKASGYTFTSYVMHWVRQKPGQGLEWIG | 510 |
| | chain | YINPYNEGTESTDKFKGRATMTSDKSTSTVYMELSSLRSEDTAVYYCAS | |
| | | IYYGYEGTYFGVWGQGTLVTVSSASTKGPSVFPLAPSSKSTSGGTAALG | |
| | | CLVKDYFPEPVTVSWNSGALTSGVHTFPAVLQSSGLYSLSSVVTVPSSS | |
| | | LGTQTYICNVNHKPSNTKVDKKVEPKSCDKTHTCPPCPAPEAAGPSVFL | |
| | | FPPKPKDTLMISRTPEVTCVVVDVSHEDPEVKFNWYVDGVEVHNAKTKP | |
| | | REEQYNSTYRVVSVLTVLHQDWLNGKEYKCKVSNKALPAPIEKTISKAK | |
| | | GQPREPQVYTLPPSREEMTKNQVSLWCLVKGFYPSDIAVEWESNGQPEN | |
| | | NYKTTPPVLDSDGSFFLYSKLTVDKSRWQQGNVFSCSVMHEALHNHYTQ | |
| | | KSLSLSPGK | |
| | 2^{nd} | QVQLVQSGAEVKKPGASVKVSCKASGYTFTSYVMHWVRQKPGQGLEWIG | 511 |
| | chain | YINPYNEGTESTDKFKGRATMTSDKSTSTVYMELSSLRSEDTAVYYCAS | |
| | | IYYGYEGTYFGVWGQGTLVTVSSASTKGPSVFPLAPSSKSTSGGTAALG | |
| | | CLVKDYFPEPVTVSWNSGALTSGVHTFPAVLQSSGLYSLSSVVTVPSSS | |
| | | LGTQTYICNVNHKPSNTKVDKKVEPKSCGGGGSGGGGSGGGGSGGGGSQ | |
| | | AVVTQEPSLTVSPGGTVTLTCRSSTGAVTTSNYANWVQQKPGQAPRGLI | |
| | | GGTNKRAPWTPARFSGSLLGGKAALTITGAQAEDEADYYCALWYSNLWV | |
| | | FGGGTKLTVLGGGGSGGGGSGGGGSGGGGSEVQLVESGGGLVQPGGSLR | |
| | | LSCAASGFTFSTYAMNWVRQAPGKGLEWVGRIRSKYNNYATYYADSVKG | |
| | | RFTISRDDSKNSLYLQMNSLKTEDTAVYYCVRHGNFGNSYVSWFAYWGQ | |
| | | GTLVTVSSDKTHTCPPCPAPEAAGPSVFLFPPKPKDTLMISRTPEVTCV | |
| | | VVDVSHEDPEVKFNWYVDGVEVHNAKTKPREEQYNSTYRVVSVLTVLHQ | |
| | | DWLNGKEYKCKVSNKALPAPIEKTISKAKGQPREPQVYTLPPSREEMTK | |
| | | NQVSLSCAVKGFYPSDIAVEWESNGQPENNYKTTPPVLDSDGSFFLVSK | |
| | | LTVDKSRWQQGNVFSCSVMHEALHNRFTQKSLSLSPGGGGGSGGGGSGG | |
| | | GGSGGGGSEIVLTQSPGTLSLSPGERATLSCRASQSVSSSYLAWYQQKP | |
| | | GQAPRLLIYGASSRATGIPDRFSGSGSGTDFTLTISRLEPEDFAVYYCQ | |
| | | QYGSSPWTFGQGTKVEIKGGGGSGGGGSGGGGSGGGGSQVQLQESGPGL | |
| | | VKPSETLSLTCTVSGGSISSYYWSWIRQPPGKGLEWIGYIYYSGITHYN | |
| | | PSLKSRVTISVDTSKIQFSLKLSSVTAADTAVYYCARWGVRRDYYYYGM | |
| | | DVWGQGTTVTVSS | |
| | 3^{rd} | EIVLTQSPATLSLSPGERATLSCRASSSVSYMHWYQQKPGQAPRPWIYA | 512 |
| | chain | TSNLASGIPARFSGSRSGTDYTLTISSLEPEDFAVYYCQQWSSNTLTFG | |
| | | GGTKVEIKRTVAAPSVFIFPPSDEQLKSGTASVVCLLNNFYPREAKVQW | |
| | | KVDNALQSGNSQESVTEQDSKDSTYSLSSTLTLSKADYEKHKVYACEVT | |
| | | HQGLSSPVTKSFNRGEC | |
| Ly2031 | 1^{st} | QVQLVQSGAEVKKPGASVKVSCKASGYTFTSYVMHWVRQKPGQGLEWIG | 513 |
| | chain | YINPYNEGTESTDKFKGRATMTSDKSTSTVYMELSSLRSEDTAVYYCAS | |
| | | IYYGYEGTYFGVWGQGTLVTVSSASTKGPSVFPLAPSSKSTSGGTAALG | |
| | | CLVKDYFPEPVTVSWNSGALTSGVHTFPAVLQSSGLYSLSSVVTVPSSS | |
| | | LGTQTYICNVNHKPSNTKVDKKVEPKSCDKTHTCPPCPAPEAAGPSVEL | |
| | | FPPKPKDTLMISRTPEVTCVVVDVSHEDPEVKFNWYVDGVEVHNAKTKP | |
| | | REEQYNSTYRVVSVLTVLHQDWLNGKEYKCKVSNKALPAPIEKTISKAK | |
| | | GQPREPQVYTLPPSREEMTKNQVSLWCLVKGFYPSDIAVEWESNGQPEN | |
| | | NYKTTPPVLDSDGSFFLYSKLTVDKSRWQQGNVFSCSVMHEALHNHYTQ | |
| | | KSLSLSPGK | |
| | 2^{nd} | QVQLVQSGAEVKKPGASVKVSCKASGYTFTSYVMHWVRQKPGQGLEWIG | 514 |
| | chain | YINPYNEGTESTDKFKGRATMTSDKSTSTVYMELSSLRSEDTAVYYCAS | |
| | | IYYGYEGTYFGVWGQGTLVTVSSASTKGPSVFPLAPSSKSTSGGTAALG | |
| | | CLVKDYFPEPVTVSWNSGALTSGVHTFPAVLQSSGLYSLSSVVTVPSSS | |
| | | LGTQTYICNVNHKPSNTKVDKKVEPKSCGGGGSGGGGSGGGGSGGGGSQ | |
| | | AVVTQEPSLTVSPGGTVTLTCRSSTGAVTTSNYANWVQQKPGQAPRGLI | |
| | | GGTNKRAPWTPARFSGSLLGGKAALTITGAQAEDEADYYCALWYSNLWV | |
| | | FGGGTKLTVLGGGGSGGGGSGGGGSGGGGSEVQLVESGGGLVQPGGSLR | |
| | | LSCAASGFTFSTYAMNWVRQAPGKGLEWVGRIRSKYNNYATYYADSVKG | |
| | | RFTISRDDSKNSLYLQMNSLKTEDTAVYYCVRHGNFGNSYVSWFAYWGQ | |
| | | GTLVTVSSDKTHTCPPCPAPEAAGPSVFLFPPKPKDTLMISRTPEVTCV | |
| | | VVDVSHEDPEVKFNWYVDGVEVHNAKTKPREEQYNSTYRVVSVLTVLHQ | |
| | | DWLNGKEYKCKVSNKALPAPIEKTISKAKGQPREPQVYTLPPSREEMTK | |
| | | NQVSLSCAVKGFYPSDIAVEWESNGQPENNYKTTPPVLDSDGSFFLVSK | |
| | | LTVDKSRWQQGNVFSCSVMHEALHNRFTQKSLSLSPGGGGGSGGGGSGG | |
| | | GGSGGGGSQVQLQESGPGLVKPSETLSLTCTVSGGSISSYYWSWIRQPP | |
| | | GKGLEWIGYIYYSGITHYNPSLKSRVTISVDTSKIQFSLKLSSVTAADT | |
| | | AVYYCARWGVRRDYYYYGMDVWGQGTTVTVSSGGGGSGGGGSGGGGSGG | |
| | | GGSEIVLTQSPGTLSLSPGERATLSCRASQSVSSSYLAWYQQKPGQAPR | |
| | | LLIYGASSRATGIPDRFSGSGSGTDFTLTISRLEPEDFAVYYCQQYGSS | |
| | | PWTFGQGTKVEIK | |
| | 3^{rd} | EIVLTQSPATLSLSPGERATLSCRASSSVSYMHWYQQKPGQAPRPWIYA | 515 |
| | chain | TSNLASGIPARFSGSRSGTDYTLTISSLEPEDFAVYYCQQWSSNTLTFG | |
| | | GGTKVEIKRTVAAPSVFIFPPSDEQLKSGTASVVCLLNNFYPREAKVQW | |
| | | KVDNALQSGNSQESVTEQDSKDSTYSLSSTLTLSKADYEKHKVYACEVT | |
| | | HQGLSSPVTKSFNRGEC | |
| Ly2032 | 1^{st} | QVQLVQSGAEVKKPGASVKVSCKASGYTFTSYVMHWVRQKPGQGLEWIG | 516 |
| | chain | YINPYNEGTESTDKFKGRATMTSDKSTSTVYMELSSLRSEDTAVYYCAS | |
| | | IYYGYEGTYFGVWGQGTLVTVSSASTKGPSVFPLAPSSKSTSGGTAALG | |
| | | CLVKDYFPEPVTVSWNSGALTSGVHTFPAVLQSSGLYSLSSVVTVPSSS | |
| | | LGTQTYICNVNHKPSNTKVDKKVEPKSCGGGGSGGGGSGGGGSGGGGSE | |
| | | VQLVESGGGLVQPGGSLRLSCAASGFTFSTYAMNWVRQAPGKGLEWVGR | |
| | | IRSKYNNYATYYADSVKGRFTISRDDSKNSLYLQMNSLKTEDTAVYYCV | |
| | | RHGNFGNSYVSWFAYWGQGTLVTVSSPAPEAAGPSVFLFPPKPKDTLMI | |
| | | SRTPEVTCVVVDVSHEDPEVKFNWYVDGVEVHNAKTKPREEQYNSTYRV | |
| | | VSVLTVLHQDWLNGKEYKCKVSNKALPAPIEKTISKAKGQPREPQVYTL | |
| | | PPSREEMTKNQVSLWCLVKGFYPSDIAVEWESNGQPENNYKTTPPVLDS | |
| | | DGSFFLYSKLTVDKSRWQQGNVFSCSVMHEALHNHYTQKSLSLSPGGGG | |
| | | GSGGGGSGGGGSGGGGSEIVLTQSPGTLSLSPGERATLSCRASQSVSSS | |
| | | YLAWYQQKPGQAPRLLIYGASSRATGIPDRFSGSGSGTDFTLTISRLEP | |
| | | EDFAVYYCQQYGSSPWTFGQGTKVEIKGGGGSGGGGSGGGGSGGGGSQV | |
| | | QLQESGPGLVKPSETLSLTCTVSGGSISSYYWSWIRQPPGKGLEWIGYI | |
| | | YYSGITHYNPSLKSRVTISVDTSKIQFSLKLSSVTAADTAVYYCARWGV | |
| | | RRDYYYYGMDVWGQGTTVTVSS | |
| | 2^{nd} | QVQLVQSGAEVKKPGASVKVSCKASGYTFTSYVMHWVRQKPGQGLEWIG | 517 |
| | chain | YINPYNEGTESTDKFKGRATMTSDKSTSTVYMELSSLRSEDTAVYYCAS | |
| | | IYYGYEGTYFGVWGQGTLVTVSSASTKGPSVFPLAPSSKSTSGGTAALG | |
| | | CLVKDYFPEPVTVSWNSGALTSGVHTFPAVLQSSGLYSLSSVVTVPSSS | |
| | | LGTQTYICNVNHKPSNTKVDKKVEPKSCGGGGSGGGGSGGGGSGGGGSQ | |
| | | AVVTQEPSLTVSPGGTVTLTCRSSTGAVTTSNYANWVQQKPGQAPRGLI | |
| | | GGTNKRAPWTPARFSGSLLGGKAALTITGAQAEDEADYYCALWYSNLWV | |
| | | FGGGTKLTVLPAPEAAGPSVFLFPPKPKDTLMISRTPEVTCVVVDVSHE | |
| | | DPEVKFNWYVDGVEVHNAKTKPREEQYNSTYRVVSVLTVLHQDWLNGKE | |
| | | YKCKVSNKALPAPIEKTISKAKGQPREPQVYTLPPSREEMTKNQVSLSC | |
| | | AVKGFYPSDIAVEWESNGQPENNYKTTPPVLDSDGSFFLVSKLTVDKSR | |
| | | WQQGNVFSCSVMHEALHNRFTQKSLSLSPGGGGGSGGGGSGGGGSGGGG | |
| | | SEIVLTQSPGTLSLSPGERATLSCRASQSVSSSYLAWYQQKPGQAPRLL | |
| | | IYGASSRATGIPDRFSGSGSGTDFTLTISRLEPEDFAVYYCQQYGSSPW | |
| | | TFGQGTKVEIKGGGGSGGGGSGGGGSGGGGSQVQLQESGPGLVKPSETL | |
| | | SLTCTVSGGSISSYYWSWIRQPPGKGLEWIGYIYYSGITHYNPSLKSRV | |
| | | TISVDTSKIQFSLKLSSVTAADTAVYYCARWGVRRDYYYYGMDVWGQGT | |
| | | TVTVSS | |
| | 3^{rd} | EIVLTQSPATLSLSPGERATLSCRASSSVSYMHWYQQKPGQAPRPWIYA | 518 |
| | chain | TSNLASGIPARFSGSRSGTDYTLTISSLEPEDFAVYYCQQWSSNTLTFG | |
| | | GGTKVEIKRTVAAPSVFIFPPSDEQLKSGTASVVCLLNNFYPREAKVQW | |
| | | KVDNALQSGNSQESVTEQDSKDSTYSLSSTLTLSKADYEKHKVYACEVT | |
| | | HQGLSSPVTKSFNRGEC | |
| Ly2033 | 1^{st} | QVQLVQSGAEVKKPGASVKVSCKASGYTFTSYVMHWVRQKPGQGLEWIG | 519 |
| | chain | YINPYNEGTESTDKFKGRATMTSDKSTSTVYMELSSLRSEDTAVYYCAS | |
| | | IYYGYEGTYFGVWGQGTLVTVSSASTKGPSVFPLAPSSKSTSGGTAALG | |
| | | CLVKDYFPEPVTVSWNSGALTSGVHTFPAVLQSSGLYSLSSVVTVPSSS | |
| | | LGTQTYICNVNHKPSNTKVDKKVEPKSCGGGGSGGGGSGGGGSGGGGSE | |
| | | VQLVESGGGLVQPGGSLRLSCAASGFTFSTYAMNWVRQAPGKGLEWVGR | |
| | | IRSKYNNYATYYADSVKGRFTISRDDSKNSLYLQMNSLKTEDTAVYYCV | |
| | | RHGNFGNSYVSWFAYWGQGTLVTVSSPAPEAAGPSVFLFPPKPKDTLMI | |
| | | SRTPEVTCVVVDVSHEDPEVKFNWYVDGVEVHNAKTKPREEQYNSTYRV | |
| | | VSVLTVLHQDWLNGKEYKCKVSNKALPAPIEKTISKAKGQPREPQVYTL | |
| | | PPSREEMTKNQVSLWCLVKGFYPSDIAVEWESNGQPENNYKTTPPVLDS | |
| | | DGSFFLYSKLTVDKSRWQQGNVFSCSVMHEALHNHYTQKSLSLSPGGGG | |
| | | GSGGGGSGGGGSGGGGSQVQLQESGPGLVKPSETLSLTCTVSGGSISSY | |
| | | YWSWIRQPPGKGLEWIGYIYYSGITHYNPSLKSRVTISVDTSKIQFSLK | |
| | | LSSVTAADTAVYYCARWGVRRDYYYYGMDVWGQGTTVTVSSGGGGSGGG | |
| | | GSGGGGSGGGGSEIVLTQSPGTLSLSPGERATLSCRASQSVSSSYLAWY | |
| | | QQKPGQAPRLLIYGASSRATGIPDRFSGSGSGTDFTLTISRLEPEDFAV | |
| | | YYCQQYGSSPWTFGQGTKVEIK | |
| | 2^{nd} | QVQLVQSGAEVKKPGASVKVSCKASGYTFTSYVMHWVRQKPGQGLEWIG | 520 |
| | chain | YINPYNEGTESTDKFKGRATMTSDKSTSTVYMELSSLRSEDTAVYYCAS | |
| | | IYYGYEGTYFGVWGQGTLVTVSSASTKGPSVFPLAPSSKSTSGGTAALG | |
| | | CLVKDYFPEPVTVSWNSGALTSGVHTFPAVLQSSGLYSLSSVVTVPSSS | |
| | | LGTQTYICNVNHKPSNTKVDKKVEPKSCGGGGSGGGGSGGGGSGGGGSQ | |
| | | AVVTQEPSLTVSPGGTVTLTCRSSTGAVTTSNYANWVQQKPGQAPRGLI | |
| | | GGTNKRAPWTPARFSGSLLGGKAALTITGAQAEDEADYYCALWYSNLWV | |
| | | FGGGTKLTVLPAPEAAGPSVFLFPPKPKDTLMISRTPEVTCVVVDVSHE | |
| | | DPEVKFNWYVDGVEVHNAKTKPREEQYNSTYRVVSVLTVLHQDWLNGKE | |
| | | YKCKVSNKALPAPIEKTISKAKGQPREPQVYTLPPSREEMTKNQVSLSC | |
| | | AVKGFYPSDIAVEWESNGQPENNYKTTPPVLDSDGSFFLVSKLTVDKSR | |
| | | WQQGNVFSCSVMHEALHNRFTQKSLSLSPGGGGGSGGGGSGGGGSGGGG | |
| | | SQVQLQESGPGLVKPSETLSLTCTVSGGSISSYYWSWIRQPPGKGLEWI | |
| | | GYIYYSGITHYNPSLKSRVTISVDTSKIQFSLKLSSVTAADTAVYYCAR | |
| | | WGVRRDYYYYGMDVWGQGTTVTVSSGGGGSGGGGSGGGGSGGGGSEIVL | |
| | | TQSPGTLSLSPGERATLSCRASQSVSSSYLAWYQQKPGQAPRLLIYGAS | |
| | | SRATGIPDRFSGSGSGTDFTLTISRLEPEDFAVYYCQQYGSSPWTFGQG | |
| | | TKVEIK | |
| | 3^{rd} | EIVLTQSPATLSLSPGERATLSCRASSSVSYMHWYQQKPGQAPRPWIYA | 521 |
| | chain | TSNLASGIPARFSGSRSGTDYTLTISSLEPEDFAVYYCQQWSSNTLTFG | |
| | | GGTKVEIKRTVAAPSVFIFPPSDEQLKSGTASVVCLLNNFYPREAKVQW | |
| | | KVDNALQSGNSQESVTEQDSKDSTYSLSSTLTLSKADYEKHKVYACEVT | |
| | | HQGLSSPVTKSFNRGEC | |
| Ly2034 | 1^{st} | QVQLVQSGAEVKKPGASVKVSCKASGYTFTSYVMHWVRQKPGQGLEWIG | 522 |
| | chain | YINPYNEGTESTDKFKGRATMTSDKSTSTVYMELSSLRSEDTAVYYCAS | |
| | | IYYGYEGTYFGVWGQGTLVTVSSASTKGPSVFPLAPSSKSTSGGTAALG | |
| | | CLVKDYFPEPVTVSWNSGALTSGVHTFPAVLQSSGLYSLSSVVTVPSSS | |
| | | LGTQTYICNVNHKPSNTKVDKKVEPKSCGGGGSGGGGSGGGGSGGGGSE | |
| | | VQLVESGGGLVQPGGSLRLSCAASGFTFSTYAMNWVRQAPGKGLEWVGR | |
| | | IRSKYNNYATYYADSVKGRFTISRDDSKNSLYLQMNSLKTEDTAVYYCV | |
| | | RHGNFGNSYVSWFAYWGQGTLVTVSSPAPEAAGPSVFLFPPKPKDTLMI | |
| | | SRTPEVTCVVVDVSHEDPEVKFNWYVDGVEVHNAKTKPREEQYNSTYRV | |
| | | VSVLTVLHQDWLNGKEYKCKVSNKALPAPIEKTISKAKGQPREPQVYTL | |
| | | PPSREEMTKNQVSLWCLVKGFYPSDIAVEWESNGQPENNYKTTPPVLDS | |
| | | DGSFFLYSKLTVDKSRWQQGNVFSCSVMHEALHNHYTQKSLSLSPGGGG | |
| | | GSGGGGSGGGGSGGGGSEIVLTQSPGTLSLSPGERATLSCRASQSVSSS | |
| | | YLAWYQQKPGQAPRLLIYGASSRATGIPDRFSGSGSGTDFTLTISRLEP | |
| | | EDFAVYYCQQYGSSPWTFGQGTKVEIKGGGGSGGGGSGGGGSGGGGSQV | |
| | | QLQESGPGLVKPSETLSLTCTVSGGSISSYYWSWIRQPPGKGLEWIGYI | |
| | | YYSGITHYNPSLKSRVTISVDTSKIQFSLKLSSVTAADTAVYYCARWGV | |
| | | RRDYYYYGMDVWGQGTTVTVSS | |
| | 2^{nd} | QVQLVQSGAEVKKPGASVKVSCKASGYTFTSYVMHWVRQKPGQGLEWIG | 523 |
| | chain | YINPYNEGTESTDKFKGRATMTSDKSTSTVYMELSSLRSEDTAVYYCAS | |
| | | IYYGYEGTYFGVWGQGTLVTVSSASTKGPSVFPLAPSSKSTSGGTAALG | |
| | | CLVKDYFPEPVTVSWNSGALTSGVHTFPAVLQSSGLYSLSSVVTVPSSS | |
| | | LGTQTYICNVNHKPSNTKVDKKVEPKSCGGGGSGGGGSGGGGSGGGGSQ | |
| | | AVVTQEPSLTVSPGGTVTLTCRSSTGAVTTSNYANWVQQKPGQAPRGLI | |
| | | GGTNKRAPWTPARFSGSLLGGKAALTITGAQAEDEADYYCALWYSNLWV | |
| | | FGGGTKLTVLPAPEAAGPSVFLFPPKPKDTLMISRTPEVTCVVVDVSHE | |
| | | DPEVKFNWYVDGVEVHNAKTKPREEQYNSTYRVVSVLTVLHQDWLNGKE | |
| | | YKCKVSNKALPAPIEKTISKAKGQPREPQVYTLPPSREEMTKNQVSLSC | |
| | | AVKGFYPSDIAVEWESNGQPENNYKTTPPVLDSDGSFFLVSKLTVDKSR | |
| | | WQQGNVFSCSVMHEALHNRFTQKSLSLSPGK | |
| | 3^{rd} | EIVLTQSPATLSLSPGERATLSCRASSSVSYMHWYQQKPGQAPRPWIYA | 524 |
| | chain | TSNLASGIPARFSGSRSGTDYTLTISSLEPEDFAVYYCQQWSSNTLTFG | |
| | | GGTKVEIKRTVAAPSVFIFPPSDEQLKSGTASVVCLLNNFYPREAKVQW | |
| | | KVDNALQSGNSQESVTEQDSKDSTYSLSSTLTLSKADYEKHKVYACEVT | |
| | | HQGLSSPVTKSFNRGEC | |
| Ly2035 | 1^{st} | QVQLVQSGAEVKKPGASVKVSCKASGYTFTSYVMHWVRQKPGQGLEWIG | 525 |
| | chain | YINPYNEGTESTDKFKGRATMTSDKSTSTVYMELSSLRSEDTAVYYCAS | |
| | | IYYGYEGTYFGVWGQGTLVTVSSASTKGPSVFPLAPSSKSTSGGTAALG | |
| | | CLVKDYFPEPVTVSWNSGALTSGVHTFPAVLQSSGLYSLSSVVTVPSSS | |
| | | LGTQTYICNVNHKPSNTKVDKKVEPKSCGGGGSGGGGSGGGGSGGGGSE | |
| | | VQLVESGGGLVQPGGSLRLSCAASGFTFSTYAMNWVRQAPGKGLEWVGR | |
| | | IRSKYNNYATYYADSVKGRFTISRDDSKNSLYLQMNSLKTEDTAVYYCV | |
| | | RHGNFGNSYVSWFAYWGQGTLVTVSSPAPEAAGPSVFLFPPKPKDTLMI | |
| | | SRTPEVTCVVVDVSHEDPEVKFNWYVDGVEVHNAKTKPREEQYNSTYRV | |
| | | VSVLTVLHQDWLNGKEYKCKVSNKALPAPIEKTISKAKGQPREPQVYTL | |
| | | PPSREEMTKNQVSLWCLVKGFYPSDIAVEWESNGQPENNYKTTPPVLDS | |
| | | DGSFFLYSKLTVDKSRWQQGNVFSCSVMHEALHNHYTQKSLSLSPGGGG | |
| | | GSGGGGSGGGGSGGGGSQVQLQESGPGLVKPSETLSLTCTVSGGSISSY | |
| | | YWSWIRQPPGKGLEWIGYIYYSGITHYNPSLKSRVTISVDTSKIQFSLK | |
| | | LSSVTAADTAVYYCARWGVRRDYYYYGMDVWGQGTTVTVSSGGGGSGGG | |
| | | GSGGGGSGGGGSEIVLTQSPGTLSLSPGERATLSCRASQSVSSSYLAWY | |
| | | QQKPGQAPRLLIYGASSRATGIPDRFSGSGSGTDFTLTISRLEPEDFAV | |
| | | YYCQQYGSSPWTFGQGTKVEIK | |
| | 2^{nd} | QVQLVQSGAEVKKPGASVKVSCKASGYTFTSYVMHWVRQKPGQGLEWIG | 526 |
| | chain | YINPYNEGTESTDKFKGRATMTSDKSTSTVYMELSSLRSEDTAVYYCAS | |
| | | IYYGYEGTYFGVWGQGTLVTVSSASTKGPSVFPLAPSSKSTSGGTAALG | |
| | | CLVKDYFPEPVTVSWNSGALTSGVHTFPAVLQSSGLYSLSSVVTVPSSS | |
| | | LGTQTYICNVNHKPSNTKVDKKVEPKSCGGGGSGGGGSGGGGSGGGGSQ | |
| | | AVVTQEPSLTVSPGGTVTLTCRSSTGAVTTSNYANWVQQKPGQAPRGLI | |
| | | GGTNKRAPWTPARFSGSLLGGKAALTITGAQAEDEADYYCALWYSNLWV | |
| | | FGGGTKLTVLPAPEAAGPSVFLFPPKPKDTLMISRTPEVTCVVVDVSHE | |
| | | DPEVKFNWYVDGVEVHNAKTKPREEQYNSTYRVVSVLTVLHQDWLNGKE | |
| | | YKCKVSNKALPAPIEKTISKAKGQPREPQVYTLPPSREEMTKNQVSLSC | |
| | | AVKGFYPSDIAVEWESNGQPENNYKTTPPVLDSDGSFFLVSKLTVDKSR | |
| | | WQQGNVFSCSVMHEALHNRFTQKSLSLSPGK | |
| | 3^{rd} | EIVLTQSPATLSLSPGERATLSCRASSSVSYMHWYQQKPGQAPRPWIYA | 527 |
| | chain | TSNLASGIPARFSGSRSGTDYTLTISSLEPEDFAVYYCQQWSSNTLTFG | |
| | | GGTKVEIKRTVAAPSVFIFPPSDEQLKSGTASVVCLLNNFYPREAKVQW | |
| | | KVDNALQSGNSQESVTEQDSKDSTYSLSSTLTLSKADYEKHKVYACEVT | |
| | | HQGLSSPVTKSFNRGEC | |
| Ly2036 | 1^{st} | QVQLVQSGAEVKKPGASVKVSCKASGYTFTSYVMHWVRQKPGQGLEWIG | 528 |
| | chain | YINPYNEGTESTDKFKGRATMTSDKSTSTVYMELSSLRSEDTAVYYCAS | |
| | | IYYGYEGTYFGVWGQGTLVTVSSASTKGPSVFPLAPSSKSTSGGTAALG | |
| | | CLVKDYFPEPVTVSWNSGALTSGVHTFPAVLQSSGLYSLSSVVTVPSSS | |
| | | LGTQTYICNVNHKPSNTKVDKKVEPKSCGGGGSGGGGSGGGGSGGGGSE | |
| | | VQLVESGGGLVQPGGSLRLSCAASGFTFSTYAMNWVRQAPGKGLEWVGR | |
| | | IRSKYNNYATYYADSVKGRFTISRDDSKNSLYLQMNSLKTEDTAVYYCV | |
| | | RHGNFGNSYVSWFAYWGQGTLVTVSSPAPEAAGPSVFLFPPKPKDTLMI | |
| | | SRTPEVTCVVVDVSHEDPEVKFNWYVDGVEVHNAKTKPREEQYNSTYRV | |
| | | VSVLTVLHQDWLNGKEYKCKVSNKALPAPIEKTISKAKGQPREPQVYTL | |
| | | PPSREEMTKNQVSLWCLVKGFYPSDIAVEWESNGQPENNYKTTPPVLDS | |
| | | DGSFFLYSKLTVDKSRWQQGNVFSCSVMHEALHNHYTQKSLSLSPGK | |
| | 2^{nd} | QVQLVQSGAEVKKPGASVKVSCKASGYTFTSYVMHWVRQKPGQGLEWIG | 529 |
| | chain | YINPYNEGTESTDKFKGRATMTSDKSTSTVYMELSSLRSEDTAVYYCAS | |
| | | IYYGYEGTYFGVWGQGTLVTVSSASTKGPSVFPLAPSSKSTSGGTAALG | |
| | | CLVKDYFPEPVTVSWNSGALTSGVHTFPAVLQSSGLYSLSSVVTVPSSS | |
| | | LGTQTYICNVNHKPSNTKVDKKVEPKSCGGGGSGGGGSGGGGSGGGGSQ | |
| | | AVVTQEPSLTVSPGGTVTLTCRSSTGAVTTSNYANWVQQKPGQAPRGLI | |
| | | GGTNKRAPWTPARFSGSLLGGKAALTITGAQAEDEADYYCALWYSNLWV | |
| | | FGGGTKLTVLPAPEAAGPSVFLFPPKPKDTLMISRTPEVTCVVVDVSHE | |
| | | DPEVKFNWYVDGVEVHNAKTKPREEQYNSTYRVVSVLTVLHQDWLNGKE | |
| | | YKCKVSNKALPAPIEKTISKAKGQPREPQVYTLPPSREEMTKNQVSLSC | |
| | | AVKGFYPSDIAVEWESNGQPENNYKTTPPVLDSDGSFFLVSKLTVDKSR | |
| | | WQQGNVFSCSVMHEALHNRFTQKSLSLSPGGGGGSGGGGSGGGGSGGGG | |
| | | SEIVLTQSPGTLSLSPGERATLSCRASQSVSSSYLAWYQQKPGQAPRLL | |
| | | IYGASSRATGIPDRFSGSGSGTDFTLTISRLEPEDFAVYYCQQYGSSPW | |
| | | TFGQGTKVEIKGGGGSGGGGSGGGGSGGGGSQVQLQESGPGLVKPSETL | |
| | | SLTCTVSGGSISSYYWSWIRQPPGKGLEWIGYIYYSGITHYNPSLKSRV | |
| | | TISVDTSKIQFSLKLSSVTAADTAVYYCARWGVRRDYYYYGMDVWGQGT | |
| | | TVTVSS | |
| | 3^{rd} | EIVLTQSPATLSLSPGERATLSCRASSSVSYMHWYQQKPGQAPRPWIYA | 530 |
| | chain | TSNLASGIPARFSGSRSGTDYTLTISSLEPEDFAVYYCQQWSSNTLTFG | |
| | | GGTKVEIKRTVAAPSVFIFPPSDEQLKSGTASVVCLLNNFYPREAKVQW | |
| | | KVDNALQSGNSQESVTEQDSKDSTYSLSSTLTLSKADYEKHKVYACEVT | |
| | | HQGLSSPVTKSFNRGEC | |
| Ly2037 | 1^{st} | QVQLVQSGAEVKKPGASVKVSCKASGYTFTSYVMHWVRQKPGQGLEWIG | 531 |
| | chain | YINPYNEGTESTDKFKGRATMTSDKSTSTVYMELSSLRSEDTAVYYCAS | |
| | | IYYGYEGTYFGVWGQGTLVTVSSASTKGPSVFPLAPSSKSTSGGTAALG | |
| | | CLVKDYFPEPVTVSWNSGALTSGVHTFPAVLQSSGLYSLSSVVTVPSSS | |
| | | LGTQTYICNVNHKPSNTKVDKKVEPKSCGGGGSGGGGSGGGGSGGGGSE | |
| | | VQLVESGGGLVQPGGSLRLSCAASGFTFSTYAMNWVRQAPGKGLEWVGR | |
| | | IRSKYNNYATYYADSVKGRFTISRDDSKNSLYLQMNSLKTEDTAVYYCV | |
| | | RHGNFGNSYVSWFAYWGQGTLVTVSSPAPEAAGPSVFLFPPKPKDTLMI | |
| | | SRTPEVTCVVVDVSHEDPEVKFNWYVDGVEVHNAKTKPREEQYNSTYRV | |
| | | VSVLTVLHQDWLNGKEYKCKVSNKALPAPIEKTISKAKGQPREPQVYTL | |
| | | PPSREEMTKNQVSLWCLVKGFYPSDIAVEWESNGQPENNYKTTPPVLDS | |
| | | DGSFFLYSKLTVDKSRWQQGNVFSCSVMHEALHNHYTQKSLSLSPGK | |
| | 2^{nd} | QVQLVQSGAEVKKPGASVKVSCKASGYTFTSYVMHWVRQKPGQGLEWIG | 532 |
| | chain | YINPYNEGTESTDKFKGRATMTSDKSTSTVYMELSSLRSEDTAVYYCAS | |
| | | IYYGYEGTYFGVWGQGTLVTVSSASTKGPSVFPLAPSSKSTSGGTAALG | |
| | | CLVKDYFPEPVTVSWNSGALTSGVHTFPAVLQSSGLYSLSSVVTVPSSS | |
| | | LGTQTYICNVNHKPSNTKVDKKVEPKSCGGGGSGGGGSGGGGSGGGGSQ | |
| | | AVVTQEPSLTVSPGGTVTLTCRSSTGAVTTSNYANWVQQKPGQAPRGLI | |
| | | GGTNKRAPWTPARFSGSLLGGKAALTITGAQAEDEADYYCALWYSNLWV | |
| | | FGGGTKLTVLPAPEAAGPSVFLFPPKPKDTLMISRTPEVTCVVVDVSHE | |
| | | DPEVKFNWYVDGVEVHNAKTKPREEQYNSTYRVVSVLTVLHQDWLNGKE | |
| | | YKCKVSNKALPAPIEKTISKAKGQPREPQVYTLPPSREEMTKNQVSLSC | |
| | | AVKGFYPSDIAVEWESNGQPENNYKTTPPVLDSDGSFFLVSKLTVDKSR | |
| | | WQQGNVFSCSVMHEALHNRFTQKSLSLSPGGGGGSGGGGSGGGGSGGGG | |
| | | SQVQLQESGPGLVKPSETLSLTCTVSGGSISSYYWSWIRQPPGKGLEWI | |
| | | GYIYYSGITHYNPSLKSRVTISVDTSKIQFSLKLSSVTAADTAVYYCAR | |
| | | WGVRRDYYYYGMDVWGQGTTVTVSSGGGGSGGGGSGGGGSGGGGSEIVL | |
| | | TQSPGTLSLSPGERATLSCRASQSVSSSYLAWYQQKPGQAPRLLIYGAS | |
| | | SRATGIPDRFSGSGSGTDFTLTISRLEPEDFAVYYCQQYGSSPWTFGQG | |
| | | TKVEIK | |
| | 3^{rd} | EIVLTQSPATLSLSPGERATLSCRASSSVSYMHWYQQKPGQAPRPWIYA | 533 |
| | chain | TSNLASGIPARFSGSRSGTDYTLTISSLEPEDFAVYYCQQWSSNTLTFG | |
| | | GGTKVEIKRTVAAPSVFIFPPSDEQLKSGTASVVCLLNNFYPREAKVQW | |
| | | KVDNALQSGNSQESVTEQDSKDSTYSLSSTLTLSKADYEKHKVYACEVT | |
| | | HQGLSSPVTKSFNRGEC | |
| Ly2038 | 1^{st} | QVQLVQSGAEVKKPGASVKVSCKASGYTFTSYVMHWVRQKPGQGLEWIG | 534 |
| | chain | YINPYNEGTESTDKFKGRATMTSDKSTSTVYMELSSLRSEDTAVYYCAS | |
| | | IYYGYEGTYFGVWGQGTLVTVSSASTKGPSVFPLAPSSKSTSGGTAALG | |
| | | CLVKDYFPEPVTVSWNSGALTSGVHTFPAVLQSSGLYSLSSVVTVPSSS | |
| | | LGTQTYICNVNHKPSNTKVDKKVEPKSCGGGGSGGGGSGGGGSGGGGSE | |
| | | VQLVESGGGLVQPGGSLRLSCAASGFTFSTYAMNWVRQAPGKGLEWVGR | |
| | | IRSKYNNYATYYADSVKGRFTISRDDSKNSLYLQMNSLKTEDTAVYYCV | |
| | | RHGNFGNSYVSWFAYWGQGTLVTVSSPAPEAAGPSVFLFPPKPKDTLMI | |
| | | SRTPEVTCVVVDVSHEDPEVKFNWYVDGVEVHNAKTKPREEQYNSTYRV | |
| | | VSVLTVLHQDWLNGKEYKCKVSNKALPAPIEKTISKAKGQPREPQVYTL | |
| | | PPSREEMTKNQVSLWCLVKGFYPSDIAVEWESNGQPENNYKTTPPVLDS | |
| | | DGSFFLYSKLTVDKSRWQQGNVFSCSVMHEALHNHYTQKSLSLSPGGGG | |
| | | GSGGGGSGGGGSGGGGSQVQLQESGPGLVKPSETLSLTCTVSGGSISSY | |
| | | YWSWIRQPPGKGLEWIGYIYYSGITHYNPSLKSRVTISVDTSKIQFSLK | |
| | | LSSVTAADTAVYYCARWGVRRDYYYYGMDVWGQGTTVTVSS | |
| | 2^{nd} | QVQLVQSGAEVKKPGASVKVSCKASGYTFTSYVMHWVRQKPGQGLEWIG | 535 |
| | chain | YINPYNEGTESTDKFKGRATMTSDKSTSTVYMELSSLRSEDTAVYYCAS | |
| | | IYYGYEGTYFGVWGQGTLVTVSSASTKGPSVFPLAPSSKSTSGGTAALG | |
| | | CLVKDYFPEPVTVSWNSGALTSGVHTFPAVLQSSGLYSLSSVVTVPSSS | |
| | | LGTQTYICNVNHKPSNTKVDKKVEPKSCGGGGSGGGGSGGGGSGGGGSQ | |
| | | AVVTQEPSLTVSPGGTVTLTCRSSTGAVTTSNYANWVQQKPGQAPRGLI | |
| | | GGTNKRAPWTPARFSGSLLGGKAALTITGAQAEDEADYYCALWYSNLWV | |
| | | FGGGTKLTVLPAPEAAGPSVFLFPPKPKDTLMISRTPEVTCVVVDVSHE | |
| | | DPEVKFNWYVDGVEVHNAKTKPREEQYNSTYRVVSVLTVLHQDWLNGKE | |
| | | YKCKVSNKALPAPIEKTISKAKGQPREPQVYTLPPSREEMTKNQVSLSC | |
| | | AVKGFYPSDIAVEWESNGQPENNYKTTPPVLDSDGSFFLVSKLTVDKSR | |
| | | WQQGNVFSCSVMHEALHNRFTQKSLSLSPGGGGGSGGGGSGGGGSGGGG | |
| | | SEIVLTQSPGTLSLSPGERATLSCRASQSVSSSYLAWYQQKPGQAPRLL | |
| | | IYGASSRATGIPDRFSGSGSGTDFTLTISRLEPEDFAVYYCQQYGSSPW | |
| | | TFGQGTKVEIK | |
| | 3^{rd} | EIVLTQSPATLSLSPGERATLSCRASSSVSYMHWYQQKPGQAPRPWIYA | 536 |
| | chain | TSNLASGIPARFSGSRSGTDYTLTISSLEPEDFAVYYCQQWSSNTLTFG | |
| | | GGTKVEIKRTVAAPSVFIFPPSDEQLKSGTASVVCLLNNFYPREAKVQW | |
| | | KVDNALQSGNSQESVTEQDSKDSTYSLSSTLTLSKADYEKHKVYACEVT | |
| | | HQGLSSPVTKSFNRGEC | |
| Ly2039 | 1^{st} | QVQLVQSGAEVKKPGASVKVSCKASGYTFTSYVMHWVRQKPGQGLEWIG | 537 |
| | chain | YINPYNEGTESTDKFKGRATMTSDKSTSTVYMELSSLRSEDTAVYYCAS | |
| | | IYYGYEGTYFGVWGQGTLVTVSSASTKGPSVFPLAPSSKSTSGGTAALG | |
| | | CLVKDYFPEPVTVSWNSGALTSGVHTFPAVLQSSGLYSLSSVVTVPSSS | |
| | | LGTQTYICNVNHKPSNTKVDKKVEPKSCGGGGSGGGGSGGGGSGGGGSE | |
| | | VQLVESGGGLVQPGGSLRLSCAASGFTFSTYAMNWVRQAPGKGLEWVGR | |
| | | IRSKYNNYATYYADSVKGRFTISRDDSKNSLYLQMNSLKTEDTAVYYCV | |
| | | RHGNFGNSYVSWFAYWGQGTLVTVSSPAPEAAGPSVFLFPPKPKDTLMI | |
| | | SRTPEVTCVVVDVSHEDPEVKFNWYVDGVEVHNAKTKPREEQYNSTYRV | |
| | | VSVLTVLHQDWLNGKEYKCKVSNKALPAPIEKTISKAKGQPREPQVYTL | |
| | | PPSREEMTKNQVSLWCLVKGFYPSDIAVEWESNGQPENNYKTTPPVLDS | |
| | | DGSFFLYSKLTVDKSRWQQGNVFSCSVMHEALHNHYTQKSLSLSPGK | |
| | 2^{nd} | QVQLVQSGAEVKKPGASVKVSCKASGYTFTSYVMHWVRQKPGQGLEWIG | 538 |
| | chain | YINPYNEGTESTDKFKGRATMTSDKSTSTVYMELSSLRSEDTAVYYCAS | |
| | | IYYGYEGTYFGVWGQGTLVTVSSASTKGPSVFPLAPSSKSTSGGTAALG | |
| | | CLVKDYFPEPVTVSWNSGALTSGVHTFPAVLQSSGLYSLSSVVTVPSSS | |
| | | LGTQTYICNVNHKPSNTKVDKKVEPKSCGGGGSGGGGSGGGGSGGGGSQ | |
| | | AVVTQEPSLTVSPGGTVTLTCRSSTGAVTTSNYANWVQQKPGQAPRGLI | |
| | | GGTNKRAPWTPARFSGSLLGGKAALTITGAQAEDEADYYCALWYSNLWV | |
| | | FGGGTKLTVLPAPEAAGPSVFLFPPKPKDTLMISRTPEVTCVVVDVSHE | |
| | | DPEVKFNWYVDGVEVHNAKTKPREEQYNSTYRVVSVLTVLHQDWLNGKE | |
| | | YKCKVSNKALPAPIEKTISKAKGQPREPQVYTLPPSREEMTKNQVSLSC | |
| | | AVKGFYPSDIAVEWESNGQPENNYKTTPPVLDSDGSFFLVSKLTVDKSR | |
| | | WQQGNVFSCSVMHEALHNRFTQKSLSLSPGK | |
| | 3^{rd} | EIVLTQSPATLSLSPGERATLSCRASSSVSYMHWYQQKPGQAPRPWIYA | 539 |
| | chain | TSNLASGIPARFSGSRSGTDYTLTISSLEPEDFAVYYCQQWSSNTLTFG | |
| | | GGTKVEIKRTVAAPSVFIFPPSDEQLKSGTASVVCLLNNFYPREAKVQW | |
| | | KVDNALQSGNSQESVTEQDSKDSTYSLSSTLTLSKADYEKHKVYACEVT | |
| | | HQGLSSPVTKSFNRGECGGGGSGGGGSGGGGSGGGGSEIVLTQSPGTLS | |
| | | LSPGERATLSCRASQSVSSSYLAWYQQKPGQAPRLLIYGASSRATGIPD | |
| | | RFSGSGSGTDFTLTISRLEPEDFAVYYCQQYGSSPWTFGQGTKVEIKGG | |
| | | GGSGGGGSGGGGSGGGGSQVQLQESGPGLVKPSETLSLTCTVSGGSISS | |
| | | YYWSWIRQPPGKGLEWIGYIYYSGITHYNPSLKSRVTISVDTSKIQFSL | |
| | | KLSSVTAADTAVYYCARWGVRRDYYYYGMDVWGQGTTVTVSS | |
| Ly2040 | 1^{st} | QVQLVQSGAEVKKPGASVKVSCKASGYTFTSYVMHWVRQKPGQGLEWIG | 540 |
| | chain | YINPYNEGTESTDKFKGRATMTSDKSTSTVYMELSSLRSEDTAVYYCAS | |
| | | IYYGYEGTYFGVWGQGTLVTVSSASTKGPSVFPLAPSSKSTSGGTAALG | |
| | | CLVKDYFPEPVTVSWNSGALTSGVHTFPAVLQSSGLYSLSSVVTVPSSS | |
| | | LGTQTYICNVNHKPSNTKVDKKVEPKSCGGGGSGGGGSGGGGSGGGGSE | |
| | | VQLVESGGGLVQPGGSLRLSCAASGFTFSTYAMNWVRQAPGKGLEWVGR | |
| | | IRSKYNNYATYYADSVKGRFTISRDDSKNSLYLQMNSLKTEDTAVYYCV | |
| | | RHGNFGNSYVSWFAYWGQGTLVTVSSPAPEAAGPSVFLFPPKPKDTLMI | |
| | | SRTPEVTCVVVDVSHEDPEVKFNWYVDGVEVHNAKTKPREEQYNSTYRV | |
| | | VSVLTVLHQDWLNGKEYKCKVSNKALPAPIEKTISKAKGQPREPQVYTL | |
| | | PPSREEMTKNQVSLWCLVKGFYPSDIAVEWESNGQPENNYKTTPPVLDS | |
| | | DGSFFLYSKLTVDKSRWQQGNVFSCSVMHEALHNHYTQKSLSLSPGK | |
| | 2^{nd} | QVQLVQSGAEVKKPGASVKVSCKASGYTFTSYVMHWVRQKPGQGLEWIG | 541 |
| | chain | YINPYNEGTESTDKFKGRATMTSDKSTSTVYMELSSLRSEDTAVYYCAS | |
| | | IYYGYEGTYFGVWGQGTLVTVSSASTKGPSVFPLAPSSKSTSGGTAALG | |
| | | CLVKDYFPEPVTVSWNSGALTSGVHTFPAVLQSSGLYSLSSVVTVPSSS | |
| | | LGTQTYICNVNHKPSNTKVDKKVEPKSCGGGGSGGGGSGGGGSGGGGSQ | |
| | | AVVTQEPSLTVSPGGTVTLTCRSSTGAVTTSNYANWVQQKPGQAPRGLI | |
| | | GGTNKRAPWTPARFSGSLLGGKAALTITGAQAEDEADYYCALWYSNLWV | |
| | | FGGGTKLTVLPAPEAAGPSVFLFPPKPKDTLMISRTPEVTCVVVDVSHE | |
| | | DPEVKFNWYVDGVEVHNAKTKPREEQYNSTYRVVSVLTVLHQDWLNGKE | |
| | | YKCKVSNKALPAPIEKTISKAKGQPREPQVYTLPPSREEMTKNQVSLSC | |
| | | AVKGFYPSDIAVEWESNGQPENNYKTTPPVLDSDGSFFLVSKLTVDKSR | |
| | | WQQGNVFSCSVMHEALHNRFTQKSLSLSPGK | |
| | 3^{rd} | EIVLTQSPATLSLSPGERATLSCRASSSVSYMHWYQQKPGQAPRPWIYA | 542 |
| | chain | TSNLASGIPARFSGSRSGTDYTLTISSLEPEDFAVYYCQQWSSNTLTFG | |
| | | GGTKVEIKRTVAAPSVFIFPPSDEQLKSGTASVVCLLNNFYPREAKVQW | |
| | | KVDNALQSGNSQESVTEQDSKDSTYSLSSTLTLSKADYEKHKVYACEVT | |
| | | HQGLSSPVTKSFNRGECGGGGSGGGGSGGGGSGGGGSQVQLQESGPGLV | |
| | | KPSETLSLTCTVSGGSISSYYWSWIRQPPGKGLEWIGYIYYSGITHYNP | |
| | | SLKSRVTISVDTSKIQFSLKLSSVTAADTAVYYCARWGVRRDYYYYGMD | |
| | | VWGQGTTVTVSSGGGGSGGGGSGGGGSGGGGSEIVLTQSPGTLSLSPGE | |
| | | RATLSCRASQSVSSSYLAWYQQKPGQAPRLLIYGASSRATGIPDRESGS | |
| | | GSGTDFTLTISRLEPEDFAVYYCQQYGSSPWTFGQGTKVEIK | |
| Ly2041 | 1^{st} | QVQLVQSGAEVKKPGASVKVSCKASGYTFTSYVMHWVRQKPGQGLEWIG | 543 |
| | chain | YINPYNEGTESTDKFKGRATMTSDKSTSTVYMELSSLRSEDTAVYYCAS | |
| | | IYYGYEGTYFGVWGQGTLVTVSSASTKGPSVFPLAPSSKSTSGGTAALG | |
| | | CLVKDYFPEPVTVSWNSGALTSGVHTFPAVLQSSGLYSLSSVVTVPSSS | |
| | | LGTQTYICNVNHKPSNTKVDKKVEPKSCDKTHTCPPCPAPEAAGPSVFL | |
| | | FPPKPKDTLMISRTPEVTCVVVDVSHEDPEVKFNWYVDGVEVHNAKTKP | |
| | | REEQYNSTYRVVSVLTVLHQDWLNGKEYKCKVSNKALPAPIEKTISKAK | |
| | | GQPREPQVYTLPPSREEMTKNQVSLWCLVKGFYPSDIAVEWESNGQPEN | |
| | | NYKTTPPVLDSDGSFFLYSKLTVDKSRWQQGNVFSCSVMHEALHNHYTQ | |
| | | KSLSLSPGGGGGSGGGGSGGGGSGGGGSEIVLTQSPGTLSLSPGERATL | |
| | | SCRASQSVSSSYLAWYQQKPGQAPRLLIYGASSRATGIPDRFSGSGSGT | |
| | | DFTLTISRLEPEDFAVYYCQQYGSSPWTFGQGTKVEIKGGGGSGGGGSG | |
| | | GGGSGGGGSQVQLQESGPGLVKPSETLSLTCTVSGGSISSYYWSWIRQP | |
| | | PGKGLEWIGYIYYSGITHYNPSLKSRVTISVDTSKIQFSLKLSSVTAAD | |
| | | TAVYYCARWGVRRDYYYYGMDVWGQGTTVTVSS | |
| | 2^{nd} | QVQLVQSGAEVKKPGASVKVSCKASGYTFTSYVMHWVRQKPGQGLEWIG | 544 |
| | chain | YINPYNEGTESTDKFKGRATMTSDKSTSTVYMELSSLRSEDTAVYYCAS | |
| | | IYYGYEGTYFGVWGQGTLVTVSSASTKGPSVFPLAPSSKSTSGGTAALG | |
| | | CLVKDYFPEPVTVSWNSGALTSGVHTFPAVLQSSGLYSLSSVVTVPSSS | |
| | | LGTQTYICNVNHKPSNTKVDKKVEPKSCDKTHTCPPCPAPEAAGPSVEL | |
| | | FPPKPKDTLMISRTPEVTCVVVDVSHEDPEVKFNWYVDGVEVHNAKTKP | |
| | | REEQYNSTYRVVSVLTVLHQDWLNGKEYKCKVSNKALPAPIEKTISKAK | |
| | | GQPREPQVYTLPPSREEMTKNQVSLSCAVKGFYPSDIAVEWESNGQPEN | |
| | | NYKTTPPVLDSDGSFFLVSKLTVDKSRWQQGNVFSCSVMHEALHNRFTQ | |
| | | KSLSLSPGGGGGSGGGGSGGGGSGGGGSDIQMTQSPSTLSASVGDRVTI | |
| | | TCSASSSVSYMNWYQQKPGKAPKLLIYDTSKLASGVPSRFSGSGSGTEF | |
| | | TLTISSLQPDDFATYYCQQWSSNPFTFGQGTKLEIKGGGGSGGGGSGGG | |
| | | GSGGGGSQVQLVQSGAEVKKPGASVKVSCKASGYTFTRYTMHWVRQAPG | |
| | | QGLEWMGYINPSRGYTNYNQKFKDRVTMTRDTSTSTVYMELSSLRSEDT | |
| | | AVYYCARYYDDHYCLDYWGQGTLVTVSS | |
| | 3^{rd} | EIVLTQSPATLSLSPGERATLSCRASSSVSYMHWYQQKPGQAPRPWIYA | 545 |
| | chain | TSNLASGIPARFSGSRSGTDYTLTISSLEPEDFAVYYCQQWSSNTLTFG | |
| | | GGTKVEIKRTVAAPSVFIFPPSDEQLKSGTASVVCLLNNFYPREAKVQW | |
| | | KVDNALQSGNSQESVTEQDSKDSTYSLSSTLTLSKADYEKHKVYACEVT | |
| | | HQGLSSPVTKSFNRGEC | |
| Ly2042 | 1^{st} | QVQLVQSGAEVKKPGASVKVSCKASGYTFTSYVMHWVRQKPGQGLEWIG | 546 |
| | chain | YINPYNEGTESTDKFKGRATMTSDKSTSTVYMELSSLRSEDTAVYYCAS | |
| | | IYYGYEGTYFGVWGQGTLVTVSSASTKGPSVFPLAPSSKSTSGGTAALG | |
| | | CLVKDYFPEPVTVSWNSGALTSGVHTFPAVLQSSGLYSLSSVVTVPSSS | |
| | | LGTQTYICNVNHKPSNTKVDKKVEPKSCDKTHTCPPCPAPEAAGPSVFL | |
| | | FPPKPKDTLMISRTPEVTCVVVDVSHEDPEVKFNWYVDGVEVHNAKTKP | |
| | | REEQYNSTYRVVSVLTVLHQDWLNGKEYKCKVSNKALPAPIEKTISKAK | |
| | | GQPREPQVYTLPPSREEMTKNQVSLWCLVKGFYPSDIAVEWESNGQPEN | |
| | | NYKTTPPVLDSDGSFFLYSKLTVDKSRWQQGNVFSCSVMHEALHNHYTQ | |
| | | KSLSLSPGGGGGSGGGGSGGGGSGGGGSQVQLQESGPGLVKPSETLSLT | |
| | | CTVSGGSISSYYWSWIRQPPGKGLEWIGYIYYSGITHYNPSLKSRVTIS | |
| | | VDTSKIQFSLKLSSVTAADTAVYYCARWGVRRDYYYYGMDVWGQGTTVT | |
| | | VSSGGGGSGGGGSGGGGSGGGGSEIVLTQSPGTLSLSPGERATLSCRAS | |
| | | QSVSSSYLAWYQQKPGQAPRLLIYGASSRATGIPDRFSGSGSGTDFTLT | |
| | | ISRLEPEDFAVYYCQQYGSSPWTFGQGTKVEIK | |
| | 2^{nd} | QVQLVQSGAEVKKPGASVKVSCKASGYTFTSYVMHWVRQKPGQGLEWIG | 547 |
| | chain | YINPYNEGTESTDKFKGRATMTSDKSTSTVYMELSSLRSEDTAVYYCAS | |
| | | IYYGYEGTYFGVWGQGTLVTVSSASTKGPSVFPLAPSSKSTSGGTAALG | |
| | | CLVKDYFPEPVTVSWNSGALTSGVHTFPAVLQSSGLYSLSSVVTVPSSS | |
| | | LGTQTYICNVNHKPSNTKVDKKVEPKSCDKTHTCPPCPAPEAAGPSVFL | |
| | | FPPKPKDTLMISRTPEVTCVVVDVSHEDPEVKFNWYVDGVEVHNAKTKP | |
| | | REEQYNSTYRVVSVLTVLHQDWLNGKEYKCKVSNKALPAPIEKTISKAK | |
| | | GQPREPQVYTLPPSREEMTKNQVSLSCAVKGFYPSDIAVEWESNGQPEN | |
| | | NYKTTPPVLDSDGSFFLVSKLTVDKSRWQQGNVFSCSVMHEALHNRFTQ | |
| | | KSLSLSPGGGGGSGGGGSGGGGSGGGGSDIQMTQSPSTLSASVGDRVTI | |
| | | TCSASSSVSYMNWYQQKPGKAPKLLIYDTSKLASGVPSRFSGSGSGTEF | |
| | | TLTISSLQPDDFATYYCQQWSSNPFTFGQGTKLEIKGGGGSGGGGSGGG | |
| | | GSGGGGSQVQLVQSGAEVKKPGASVKVSCKASGYTFTRYTMHWVRQAPG | |
| | | QGLEWMGYINPSRGYTNYNQKFKDRVTMTRDTSTSTVYMELSSLRSEDT | |
| | | AVYYCARYYDDHYCLDYWGQGTLVTVSS | |
| | 3^{rd} | EIVLTQSPATLSLSPGERATLSCRASSSVSYMHWYQQKPGQAPRPWIYA | 548 |
| | chain | TSNLASGIPARFSGSRSGTDYTLTISSLEPEDFAVYYCQQWSSNTLTFG | |
| | | GGTKVEIKRTVAAPSVFIFPPSDEQLKSGTASVVCLLNNFYPREAKVQW | |
| | | KVDNALQSGNSQESVTEQDSKDSTYSLSSTLTLSKADYEKHKVYACEVT | |
| | | HQGLSSPVTKSFNRGEC | |

Characterization of anti-B7H3/CD3/CD28 tri-specific antibodies

[0355] These tri-specific antibodies are evaluated for their in vitro and in vivo activity, including binding to target antigen (B7H3, CD3 and CD28), agonistic activity in CD3 and CD28 reporter assay system, activation of immune cells, anti-tumor activity in mouse models.

### Example 11: Anti-B7H3/CD3/OX40 Tri-Specific Antibodies

[0356] Anti-B7H3/CD3/OX40 tri-specific were produced using the same parent anti-B7H3 and anti-CD3 antibodies disclosed above and the anti-OX40 parent antibody Ly598 (CD40 Ab1).

[0357] The sequences of the parent antibody clones are provided in Table 1 above. cDNAs encoding the V_{H} and V_{L} chains of these parent antibodies were used as the starting materials for making the tri-specific antibodies. CHO-cell transient expression was carried out with plasmids configured for expressing polypeptide chains of the tri-specific antibodies. These antibodies were purified by protein A affinity chromatography.

[0358] The amino acid sequences of the polypeptide chains of the tri-specific antibodies are provided in Table 11 below:

TABLE 11
Exemplary Anti-B7H3/CD3/OX40 Tri-Specific Antibodies

| | | | SED ID |
|---|---|---|---|
| Antibody Clones | | Amino acid sequence | NO: |
| Ly1919 | 1^{st} | QVQLVQSGAEVKKPGASVKVSCKASGYTFTSYVMHWVRQKPGQGLEWIG | 549 |
| | chain | YINPYNEGTESTDKFKGRATMTSDKSTSTVYMELSSLRSEDTAVYYCAS | |
| | | IYYGYEGTYFGVWGQGTLVTVSSASTKGPSVFPLAPSSKSTSGGTAALG | |
| | | CLVKDYFPEPVTVSWNSGALTSGVHTFPAVLQSSGLYSLSSVVTVPSSS | |
| | | LGTQTYICNVNHKPSNTKVDKKVEPKSCGGGGSGGGGSGGGGSGGGGSE | |
| | | VQLVESGGGLVQPGGSLRLSCAASGFTFSTYAMNWVRQAPGKGLEWVGR | |
| | | IRSKYNNYATYYADSVKGRFTISRDDSKNSLYLQMNSLKTEDTAVYYCV | |
| | | RHGNFGNSYVSWFAYWGQGTLVTVSSPAPELLGPSVFLFPPKPKDTLMI | |
| | | SRTPEVTCVVVDVSHEDPEVKFNWYVDGVEVHNAKTKPREEQYNSTYRV | |
| | | VSVLTVLHQDWLNGKEYKCKVSNKALPAPIEKTISKAKGQPREPQVYTL | |
| | | PPSREEMTKNQVSLWCLVKGFYPSDIAVEWESNGQPENNYKTTPPVLDS | |
| | | DGSFFLYSKLTVDKSRWQQGNVFSCSVMHEALHNHYTQKSLSLSPGK | |
| | 2^{nd} | EVQLVQSGAEVKKPGASVKVSCKASGYTFTDSYMSWVRQAPGQGLEWIG | 550 |
| | chain | DMYPDNGDSSYNQKFRERVTITRDTSTSTAYLELSSLRSEDTAVYYCVL | |
| | | APRWYFSVWGQGTLVTVSSASVAAPSVFIFPPSDEQLKSGTASVVCLLN | |
| | | NFYPREAKVQWKVDNALQSGNSQESVTEQDSKDSTYSLSSTLTLSKADY | |
| | | EKHKVYACEVTHQGLSSPVTKSFNRGECGGGGSGGGGSGGGGSGGGGSQ | |
| | | AVVTQEPSLTVSPGGTVTLTCRSSTGAVTTSNYANWVQQKPGQAPRGLI | |
| | | GGTNKRAPWTPARFSGSLLGGKAALTITGAQAEDEADYYCALWYSNLWV | |
| | | FGGGTKLTVLPAPELLGPSVFLFPPKPKDTLMISRTPEVTCVVVDVSHE | |
| | | DPEVKFNWYVDGVEVHNAKTKPREEQYNSTYRVVSVLTVLHQDWLNGKE | |
| | | YKCKVSNKALPAPIEKTISKAKGQPREPQVYTLPPSREEMTKNQVSLSC | |
| | | AVKGFYPSDIAVEWESNGQPENNYKTTPPVLDSDGSFFLVSKLTVDKSR | |
| | | WQQGNVFSCSVMHEALHNRFTQKSLSLSPGK | |
| | 3^{rd} | EIVLTQSPATLSLSPGERATLSCRASSSVSYMHWYQQKPGQAPRPWIYA | 551 |
| | chain | TSNLASGIPARFSGSRSGTDYTLTISSLEPEDFAVYYCQQWSSNTLTFG | |
| | | GGTKVEIKRTVAAPSVFIFPPSDEQLKSGTASVVCLLNNFYPREAKVQW | |
| | | KVDNALQSGNSQESVTEQDSKDSTYSLSSTLTLSKADYEKHKVYACEVT | |
| | | HQGLSSPVTKSFNRGEC | |
| | 4^{th} | DIQMTQSPSSLSASVGDRVTITCRASQDISNYLNWYQQKPGKAPKLLIY | 552 |
| | chain | YTSRLRSGVPSRFSGSGSGTDFTLTISSLQPEDFATYYCQQGHTLPPTF | |
| | | GQGTKVEIKSSASTKGPSVFPLAPSSKSTSGGTAALGCLVKDYFPEPVT | |
| | | VSWNSGALTSGVHTFPAVLQSSGLYSLSSVVTVPSSSLGTQTYICNVNH | |
| | | KPSNTKVDKKVEPKSC | |
| Ly1920 | 1^{st} | QVQLVQSGAEVKKPGASVKVSCKASGYTFTSYVMHWVRQKPGQGLEWIG | 553 |
| | chain | YINPYNEGTESTDKFKGRATMTSDKSTSTVYMELSSLRSEDTAVYYCAS | |
| | | IYYGYEGTYFGVWGQGTLVTVSSASTKGPSVFPLAPSSKSTSGGTAALG | |
| | | CLVKDYFPEPVTVSWNSGALTSGVHTFPAVLQSSGLYSLSSVVTVPSSS | |
| | | LGTQTYICNVNHKPSNTKVDKKVEPKSCDKTHTCPPCPAPEAAGPSVFL | |
| | | FPPKPKDTLMISRTPEVTCVVVDVSHEDPEVKFNWYVDGVEVHNAKTKP | |
| | | REEQYNSTYRVVSVLTVLHQDWLNGKEYKCKVSNKALPAPIEKTISKAK | |
| | | GQPREPQVYTLPPSREEMTKNQVSLWCLVKGFYPSDIAVEWESNGQPEN | |
| | | NYKTTPPVLDSDGSFFLYSKLTVDKSRWQQGNVFSCSVMHEALHNHYTQ | |
| | | KSLSLSPGGGGGSGGGGSGGGGSGGGGSDIQMTQSPSSLSASVGDRVTI | |
| | | TCRASQDISNYLNWYQQKPGKAPKLLIYYTSRLRSGVPSRFSGSGSGTD | |
| | | FTLTISSLQPEDFATYYCQQGHTLPPTFGQGTKVEIKGGGGSGGGGSGG | |
| | | GGSGGGGSEVQLVQSGAEVKKPGASVKVSCKASGYTFTDSYMSWVRQAP | |
| | | GQGLEWIGDMYPDNGDSSYNQKFRERVTITRDTSTSTAYLELSSLRSED | |
| | | TAVYYCVLAPRWYFSVWGQGTLVTVSS | |
| | 2^{nd} | QVQLVQSGAEVKKPGASVKVSCKASGYTFTSYVMHWVRQKPGQGLEWIG | 554 |
| | chain | YINPYNEGTESTDKFKGRATMTSDKSTSTVYMELSSLRSEDTAVYYCAS | |
| | | IYYGYEGTYFGVWGQGTLVTVSSASTKGPSVFPLAPSSKSTSGGTAALG | |
| | | CLVKDYFPEPVTVSWNSGALTSGVHTFPAVLQSSGLYSLSSVVTVPSSS | |
| | | LGTQTYICNVNHKPSNTKVDKKVEPKSCGGGGSGGGGSGGGGSGGGGSE | |
| | | VQLVESGGGLVQPGGSLRLSCAASGFTFSTYAMNWVRQAPGKGLEWVGR | |
| | | IRSKYNNYATYYADSVKGRFTISRDDSKNSLYLQMNSLKTEDTAVYYCV | |
| | | RHGNFGNSYVSWFAYWGQGTLVTVSSASVAAPSVFIFPPSDEQLKSGTA | |
| | | SVVCLLNNFYPREAKVQWKVDNALQSGNSQESVTEQDSKDSTYSLSSTL | |
| | | TLSKADYEKHKVYACEVTHQGLSSPVTKSFNRGECDKTHTCPPCPAPEA | |
| | | AGPSVFLFPPKPKDTLMISRTPEVTCVVVDVSHEDPEVKFNWYVDGVEV | |
| | | HNAKTKPREEQYNSTYRVVSVLTVLHQDWLNGKEYKCKVSNKALPAPIE | |
| | | KTISKAKGQPREPQVYTLPPSREEMTKNQVSLSCAVKGFYPSDIAVEWE | |
| | | SNGQPENNYKTTPPVLDSDGSFFLVSKLTVDKSRWQQGNVFSCSVMHEA | |
| | | LHNRFTQKSLSLSPGGGGGSGGGGSGGGGSGGGGSDIQMTQSPSSLSAS | |
| | | VGDRVTITCRASQDISNYLNWYQQKPGKAPKLLIYYTSRLRSGVPSRFS | |
| | | GSGSGTDFTLTISSLQPEDFATYYCQQGHTLPPTFGQGTKVEIKGGGGS | |
| | | GGGGSGGGGSGGGGSEVQLVQSGAEVKKPGASVKVSCKASGYTFTDSYM | |
| | | SWVRQAPGQGLEWIGDMYPDNGDSSYNQKFRERVTITRDTSTSTAYLEL | |
| | | SSLRSEDTAVYYCVLAPRWYFSVWGQGTLVTVSS | |
| | 3^{rd} | EIVLTQSPATLSLSPGERATLSCRASSSVSYMHWYQQKPGQAPRPWIYA | 555 |
| | chain | TSNLASGIPARFSGSRSGTDYTLTISSLEPEDFAVYYCQQWSSNTLTFG | |
| | | GGTKVEIKRTVAAPSVFIFPPSDEQLKSGTASVVCLLNNFYPREAKVQW | |
| | | KVDNALQSGNSQESVTEQDSKDSTYSLSSTLTLSKADYEKHKVYACEVT | |
| | | HQGLSSPVTKSFNRGEC | |
| | 4^{th} | QAVVTQEPSLTVSPGGTVTLTCRSSTGAVTTSNYANWVQQKPGQAPRGL | 556 |
| | chain | IGGTNKRAPWTPARFSGSLLGGKAALTITGAQAEDEADYYCALWYSNLW | |
| | | VFGGGTKLTVLSSASTKGPSVFPLAPSSKSTSGGTAALGCLVKDYFPEP | |
| | | VTVSWNSGALTSGVHTFPAVLQSSGLYSLSSVVTVPSSSLGTQTYICNV | |
| | | NHKPSNTKVDKKVEPKSC | |
| Ly1921 | 1^{st} | QVQLVQSGAEVKKPGASVKVSCKASGYTFTSYVMHWVRQKPGQGLEWIG | 557 |
| | chain | YINPYNEGTESTDKFKGRATMTSDKSTSTVYMELSSLRSEDTAVYYCAS | |
| | | IYYGYEGTYFGVWGQGTLVTVSSASTKGPSVFPLAPSSKSTSGGTAALG | |
| | | CLVKDYFPEPVTVSWNSGALTSGVHTFPAVLQSSGLYSLSSVVTVPSSS | |
| | | LGTQTYICNVNHKPSNTKVDKKVEPKSCDKTHTCPPCPAPEAAGPSVFL | |
| | | FPPKPKDTLMISRTPEVTCVVVDVSHEDPEVKFNWYVDGVEVHNAKTKP | |
| | | REEQYNSTYRVVSVLTVLHQDWLNGKEYKCKVSNKALPAPIEKTISKAK | |
| | | GQPREPQVYTLPPSREEMTKNQVSLWCLVKGFYPSDIAVEWESNGQPEN | |
| | | NYKTTPPVLDSDGSFFLYSKLTVDKSRWQQGNVFSCSVMHEALHNHYTQ | |
| | | KSLSLSPGK | |
| | 2^{nd} | QVQLVQSGAEVKKPGASVKVSCKASGYTFTSYVMHWVRQKPGQGLEWIG | 558 |
| | chain | YINPYNEGTESTDKFKGRATMTSDKSTSTVYMELSSLRSEDTAVYYCAS | |
| | | IYYGYEGTYFGVWGQGTLVTVSSASTKGPSVFPLAPSSKSTSGGTAALG | |
| | | CLVKDYFPEPVTVSWNSGALTSGVHTFPAVLQSSGLYSLSSVVTVPSSS | |
| | | LGTQTYICNVNHKPSNTKVDKKVEPKSCGGGGSGGGGSGGGGSGGGGSE | |
| | | VQLVESGGGLVQPGGSLRLSCAASGFTFSTYAMNWVRQAPGKGLEWVGR | |
| | | IRSKYNNYATYYADSVKGRFTISRDDSKNSLYLQMNSLKTEDTAVYYCV | |
| | | RHGNFGNSYVSWFAYWGQGTLVTVSSASVAAPSVFIFPPSDEQLKSGTA | |
| | | SVVCLLNNFYPREAKVQWKVDNALQSGNSQESVTEQDSKDSTYSLSSTL | |
| | | TLSKADYEKHKVYACEVTHQGLSSPVTKSFNRGECDKTHTCPPCPAPEA | |
| | | AGPSVFLFPPKPKDTLMISRTPEVTCVVVDVSHEDPEVKFNWYVDGVEV | |
| | | HNAKTKPREEQYNSTYRVVSVLTVLHQDWLNGKEYKCKVSNKALPAPIE | |
| | | KTISKAKGQPREPQVYTLPPSREEMTKNQVSLSCAVKGFYPSDIAVEWE | |
| | | SNGQPENNYKTTPPVLDSDGSFFLVSKLTVDKSRWQQGNVFSCSVMHEA | |
| | | LHNRFTQKSLSLSPGGGGGSGGGGSGGGGSGGGGSDIQMTQSPSSLSAS | |
| | | VGDRVTITCRASQDISNYLNWYQQKPGKAPKLLIYYTSRLRSGVPSRFS | |
| | | GSGSGTDFTLTISSLQPEDFATYYCQQGHTLPPTFGQGTKVEIKGGGGS | |
| | | GGGGSGGGGSGGGGSEVQLVQSGAEVKKPGASVKVSCKASGYTFTDSYM | |
| | | SWVRQAPGQGLEWIGDMYPDNGDSSYNQKFRERVTITRDTSTSTAYLEL | |
| | | SSLRSEDTAVYYCVLAPRWYFSVWGQGTLVTVSS | |
| | 3^{rd} | EIVLTQSPATLSLSPGERATLSCRASSSVSYMHWYQQKPGQAPRPWIYA | 559 |
| | chain | TSNLASGIPARFSGSRSGTDYTLTISSLEPEDFAVYYCQQWSSNTLTFG | |
| | | GGTKVEIKRTVAAPSVFIFPPSDEQLKSGTASVVCLLNNFYPREAKVQW | |
| | | KVDNALQSGNSQESVTEQDSKDSTYSLSSTLTLSKADYEKHKVYACEVT | |
| | | HQGLSSPVTKSFNRGEC | |
| | 4^{th} | QAVVTQEPSLTVSPGGTVTLTCRSSTGAVTTSNYANWVQQKPGQAPRGL | 560 |
| | chain | IGGTNKRAPWTPARFSGSLLGGKAALTITGAQAEDEADYYCALWYSNLW | |
| | | VFGGGTKLTVLSSASTKGPSVFPLAPSSKSTSGGTAALGCLVKDYFPEP | |
| | | VTVSWNSGALTSGVHTFPAVLQSSGLYSLSSVVTVPSSSLGTQTYICNV | |
| | | NHKPSNTKVDKKVEPKSC | |
| Ly1922 | 1^{st} | QVQLVQSGAEVKKPGASVKVSCKASGYTFTSYVMHWVRQKPGQGLEWIG | 561 |
| | chain | YINPYNEGTESTDKFKGRATMTSDKSTSTVYMELSSLRSEDTAVYYCAS | |
| | | IYYGYEGTYFGVWGQGTLVTVSSASTKGPSVFPLAPSSKSTSGGTAALG | |
| | | CLVKDYFPEPVTVSWNSGALTSGVHTFPAVLQSSGLYSLSSVVTVPSSS | |
| | | LGTQTYICNVNHKPSNTKVDKKVEPKSCDKTHTCPPCPAPEAAGPSVFL | |
| | | FPPKPKDTLMISRTPEVTCVVVDVSHEDPEVKFNWYVDGVEVHNAKTKP | |
| | | REEQYNSTYRVVSVLTVLHQDWLNGKEYKCKVSNKALPAPIEKTISKAK | |
| | | GQPREPQVYTLPPSREEMTKNQVSLWCLVKGFYPSDIAVEWESNGQPEN | |
| | | NYKTTPPVLDSDGSFFLYSKLTVDKSRWQQGNVFSCSVMHEALHNHYTQ | |
| | | KSLSLSPGGGGGSGGGGSGGGGSGGGGSDIQMTQSPSSLSASVGDRVTI | |
| | | TCRASQDISNYLNWYQQKPGKAPKLLIYYTSRLRSGVPSRFSGSGSGTD | |
| | | FTLTISSLQPEDFATYYCQQGHTLPPTFGQGTKVEIKGGGGSGGGGSGG | |
| | | GGSGGGGSEVQLVQSGAEVKKPGASVKVSCKASGYTFTDSYMSWVRQAP | |
| | | GQGLEWIGDMYPDNGDSSYNQKFRERVTITRDTSTSTAYLELSSLRSED | |
| | | TAVYYCVLAPRWYFSVWGQGTLVTVSS | |
| | 2^{nd} | QVQLVQSGAEVKKPGASVKVSCKASGYTFTSYVMHWVRQKPGQGLEWIG | 562 |
| | chain | YINPYNEGTESTDKFKGRATMTSDKSTSTVYMELSSLRSEDTAVYYCAS | |
| | | IYYGYEGTYFGVWGQGTLVTVSSASTKGPSVFPLAPSSKSTSGGTAALG | |
| | | CLVKDYFPEPVTVSWNSGALTSGVHTFPAVLQSSGLYSLSSVVTVPSSS | |
| | | LGTQTYICNVNHKPSNTKVDKKVEPKSCGGGGSGGGGSGGGGSGGGGSE | |
| | | VQLVESGGGLVQPGGSLRLSCAASGFTFSTYAMNWVRQAPGKGLEWVGR | |
| | | IRSKYNNYATYYADSVKGRFTISRDDSKNSLYLQMNSLKTEDTAVYYCV | |
| | | RHGNFGNSYVSWFAYWGQGTLVTVSSASVAAPSVFIFPPSDEQLKSGTA | |
| | | SVVCLLNNFYPREAKVQWKVDNALQSGNSQESVTEQDSKDSTYSLSSTL | |
| | | TLSKADYEKHKVYACEVTHQGLSSPVTKSFNRGECDKTHTCPPCPAPEA | |
| | | AGPSVFLFPPKPKDTLMISRTPEVTCVVVDVSHEDPEVKFNWYVDGVEV | |
| | | HNAKTKPREEQYNSTYRVVSVLTVLHQDWLNGKEYKCKVSNKALPAPIE | |
| | | KTISKAKGQPREPQVYTLPPSREEMTKNQVSLSCAVKGFYPSDIAVEWE | |
| | | SNGQPENNYKTTPPVLDSDGSFFLVSKLTVDKSRWQQGNVFSCSVMHEA | |
| | | LHNRFTQKSLSLSPGK | |
| | 3^{rd} | EIVLTQSPATLSLSPGERATLSCRASSSVSYMHWYQQKPGQAPRPWIYA | 563 |
| | chain | TSNLASGIPARFSGSRSGTDYTLTISSLEPEDFAVYYCQQWSSNTLTFG | |
| | | GGTKVEIKRTVAAPSVFIFPPSDEQLKSGTASVVCLLNNFYPREAKVQW | |
| | | KVDNALQSGNSQESVTEQDSKDSTYSLSSTLTLSKADYEKHKVYACEVT | |
| | | HQGLSSPVTKSFNRGEC | |
| | 4^{th} | QAVVTQEPSLTVSPGGTVTLTCRSSTGAVTTSNYANWVQQKPGQAPRGL | 564 |
| | chain | IGGTNKRAPWTPARFSGSLLGGKAALTITGAQAEDEADYYCALWYSNLW | |
| | | VFGGGTKLTVLSSASTKGPSVFPLAPSSKSTSGGTAALGCLVKDYFPEP | |
| | | VTVSWNSGALTSGVHTFPAVLQSSGLYSLSSVVTVPSSSLGTQTYICNV | |
| | | NHKPSNTKVDKKVEPKSC | |
| Ly1923 | 1^{st} | QVQLVQSGAEVKKPGASVKVSCKASGYTFTSYVMHWVRQKPGQGLEWIG | 565 |
| | chain | YINPYNEGTESTDKFKGRATMTSDKSTSTVYMELSSLRSEDTAVYYCAS | |
| | | IYYGYEGTYFGVWGQGTLVTVSSASTKGPSVFPLAPSSKSTSGGTAALG | |
| | | CLVKDYFPEPVTVSWNSGALTSGVHTFPAVLQSSGLYSLSSVVTVPSSS | |
| | | LGTQTYICNVNHKPSNTKVDKKVEPKSCDKTHTCPPCPAPEAAGPSVFL | |
| | | FPPKPKDTLMISRTPEVTCVVVDVSHEDPEVKFNWYVDGVEVHNAKTKP | |
| | | REEQYNSTYRVVSVLTVLHQDWLNGKEYKCKVSNKALPAPIEKTISKAK | |
| | | GQPREPQVYTLPPSREEMTKNQVSLWCLVKGFYPSDIAVEWESNGQPEN | |
| | | NYKTTPPVLDSDGSFFLYSKLTVDKSRWQQGNVFSCSVMHEALHNHYTQ | |
| | | KSLSLSPGGGGGSGGGGSGGGGSGGGGSEVQLVQSGAEVKKPGASVKVS | |
| | | CKASGYTFTDSYMSWVRQAPGQGLEWIGDMYPDNGDSSYNQKFRERVTI | |
| | | TRDTSTSTAYLELSSLRSEDTAVYYCVLAPRWYFSVWGQGTLVTVSS | |
| | 2^{nd} | QVQLVQSGAEVKKPGASVKVSCKASGYTFTSYVMHWVRQKPGQGLEWIG | 566 |
| | chain | YINPYNEGTESTDKFKGRATMTSDKSTSTVYMELSSLRSEDTAVYYCAS | |
| | | IYYGYEGTYFGVWGQGTLVTVSSASTKGPSVFPLAPSSKSTSGGTAALG | |
| | | CLVKDYFPEPVTVSWNSGALTSGVHTFPAVLQSSGLYSLSSVVTVPSSS | |
| | | LGTQTYICNVNHKPSNTKVDKKVEPKSCGGGGSGGGGSGGGGSGGGGSE | |
| | | VQLVESGGGLVQPGGSLRLSCAASGFTFSTYAMNWVRQAPGKGLEWVGR | |
| | | IRSKYNNYATYYADSVKGRFTISRDDSKNSLYLQMNSLKTEDTAVYYCV | |
| | | RHGNFGNSYVSWFAYWGQGTLVTVSSASVAAPSVFIFPPSDEQLKSGTA | |
| | | SVVCLLNNFYPREAKVQWKVDNALQSGNSQESVTEQDSKDSTYSLSSTL | |
| | | TLSKADYEKHKVYACEVTHQGLSSPVTKSFNRGECDKTHTCPPCPAPEA | |
| | | AGPSVFLFPPKPKDTLMISRTPEVTCVVVDVSHEDPEVKFNWYVDGVEV | |
| | | HNAKTKPREEQYNSTYRVVSVLTVLHQDWLNGKEYKCKVSNKALPAPIE | |
| | | KTISKAKGQPREPQVYTLPPSREEMTKNQVSLSCAVKGFYPSDIAVEWE | |
| | | SNGQPENNYKTTPPVLDSDGSFFLVSKLTVDKSRWQQGNVFSCSVMHEA | |
| | | LHNRFTQKSLSLSPGGGGGSGGGGSGGGGSGGGGSDIQMTQSPSSLSAS | |
| | | VGDRVTITCRASQDISNYLNWYQQKPGKAPKLLIYYTSRLRSGVPSRFS | |
| | | GSGSGTDFTLTISSLQPEDFATYYCQQGHTLPPTFGQGTKVEIK | |
| | 3^{rd} | EIVLTQSPATLSLSPGERATLSCRASSSVSYMHWYQQKPGQAPRPWIYA | 567 |
| | chain | TSNLASGIPARFSGSRSGTDYTLTISSLEPEDFAVYYCQQWSSNTLTFG | |
| | | GGTKVEIKRTVAAPSVFIFPPSDEQLKSGTASVVCLLNNFYPREAKVQW | |
| | | KVDNALQSGNSQESVTEQDSKDSTYSLSSTLTLSKADYEKHKVYACEVT | |
| | | HQGLSSPVTKSFNRGEC | |
| | 4^{th} | QAVVTQEPSLTVSPGGTVTLTCRSSTGAVTTSNYANWVQQKPGQAPRGL | 568 |
| | chain | IGGTNKRAPWTPARFSGSLLGGKAALTITGAQAEDEADYYCALWYSNLW | |
| | | VFGGGTKLTVLSSASTKGPSVFPLAPSSKSTSGGTAALGCLVKDYFPEP | |
| | | VTVSWNSGALTSGVHTFPAVLQSSGLYSLSSVVTVPSSSLGTQTYICNV | |
| | | NHKPSNTKVDKKVEPKSC | |
| Ly1924 | 1^{st} | QVQLVQSGAEVKKPGASVKVSCKASGYTFTSYVMHWVRQKPGQGLEWIG | 569 |
| | chain | YINPYNEGTESTDKFKGRATMTSDKSTSTVYMELSSLRSEDTAVYYCAS | |
| | | IYYGYEGTYFGVWGQGTLVTVSSASTKGPSVFPLAPSSKSTSGGTAALG | |
| | | CLVKDYFPEPVTVSWNSGALTSGVHTFPAVLQSSGLYSLSSVVTVPSSS | |
| | | LGTQTYICNVNHKPSNTKVDKKVEPKSCDKTHTCPPCPAPEAAGPSVFL | |
| | | FPPKPKDTLMISRTPEVTCVVVDVSHEDPEVKFNWYVDGVEVHNAKTKP | |
| | | REEQYNSTYRVVSVLTVLHQDWLNGKEYKCKVSNKALPAPIEKTISKAK | |
| | | GQPREPQVYTLPPSREEMTKNQVSLWCLVKGFYPSDIAVEWESNGQPEN | |
| | | NYKTTPPVLDSDGSFFLYSKLTVDKSRWQQGNVFSCSVMHEALHNHYTQ | |
| | | KSLSLSPGGGGGSGGGGSGGGGSGGGGSEIVLTQSPATLSLSPGERATL | |
| | | SCRASKSVRTGMHWYQQKPGQAPRLLIYGASNLESGIPARFSGSGSGTD | |
| | | FTLTISSLEPEDFAVYYCQQSWNHFTFGQGTKLEIKGGGGSGGGGSGGG | |
| | | GSGGGGSQVQLQESGPGLVKPSETLSLTCTVSGFSLTSYNVHWIRQPPG | |
| | | KGLEWIGVIWSGVRTDYNSVLKPRVTISVDTSKNQFSLKLSSVTAADTA | |
| | | VYYCARGTYDDNYHDVMDAWGQGTLVTVSS | |
| | 2^{nd} | QVQLVQSGAEVKKPGASVKVSCKASGYTFTSYVMHWVRQKPGQGLEWIG | 570 |
| | chain | YINPYNEGTESTDKFKGRATMTSDKSTSTVYMELSSLRSEDTAVYYCAS | |
| | | IYYGYEGTYFGVWGQGTLVTVSSASTKGPSVFPLAPSSKSTSGGTAALG | |
| | | CLVKDYFPEPVTVSWNSGALTSGVHTFPAVLQSSGLYSLSSVVTVPSSS | |
| | | LGTQTYICNVNHKPSNTKVDKKVEPKSCGGGGSGGGGSGGGGSGGGGSQ | |
| | | AVVTQEPSLTVSPGGTVTLTCRSSTGAVTTSNYANWVQQKPGQAPRGLI | |
| | | GGTNKRAPWTPARFSGSLLGGKAALTITGAQAEDEADYYCALWYSNLWV | |
| | | FGGGTKLTVLGGGGSGGGGSGGGGSGGGGSEVQLVESGGGLVQPGGSLR | |
| | | LSCAASGFTFSTYAMNWVRQAPGKGLEWVGRIRSKYNNYATYYADSVKG | |
| | | RFTISRDDSKNSLYLQMNSLKTEDTAVYYCVRHGNFGNSYVSWFAYWGQ | |
| | | GTLVTVSSDKTHTCPPCPAPEAAGPSVFLFPPKPKDTLMISRTPEVTCV | |
| | | VVDVSHEDPEVKFNWYVDGVEVHNAKTKPREEQYNSTYRVVSVLTVLHQ | |
| | | DWLNGKEYKCKVSNKALPAPIEKTISKAKGQPREPQVYTLPPSREEMTK | |
| | | NQVSLSCAVKGFYPSDIAVEWESNGQPENNYKTTPPVLDSDGSFFLVSK | |
| | | LTVDKSRWQQGNVFSCSVMHEALHNRFTQKSLSLSPGK | |
| | 3^{rd} | EIVLTQSPATLSLSPGERATLSCRASSSVSYMHWYQQKPGQAPRPWIYA | 571 |
| | chain | TSNLASGIPARFSGSRSGTDYTLTISSLEPEDFAVYYCQQWSSNTLTFG | |
| | | GGTKVEIKRTVAAPSVFIFPPSDEQLKSGTASVVCLLNNFYPREAKVQW | |
| | | KVDNALQSGNSQESVTEQDSKDSTYSLSSTLTLSKADYEKHKVYACEVT | |
| | | HQGLSSPVTKSFNRGEC | |
| Ly1925 | 1^{st} | QVQLVQSGAEVKKPGASVKVSCKASGYTFTSYVMHWVRQKPGQGLEWIG | 572 |
| | chain | YINPYNEGTESTDKFKGRATMTSDKSTSTVYMELSSLRSEDTAVYYCAS | |
| | | IYYGYEGTYFGVWGQGTLVTVSSASTKGPSVFPLAPSSKSTSGGTAALG | |
| | | CLVKDYFPEPVTVSWNSGALTSGVHTFPAVLQSSGLYSLSSVVTVPSSS | |
| | | LGTQTYICNVNHKPSNTKVDKKVEPKSCDKTHTCPPCPAPEAAGPSVFL | |
| | | FPPKPKDTLMISRTPEVTCVVVDVSHEDPEVKFNWYVDGVEVHNAKTKP | |
| | | REEQYNSTYRVVSVLTVLHQDWLNGKEYKCKVSNKALPAPIEKTISKAK | |
| | | GQPREPQVYTLPPSREEMTKNQVSLWCLVKGFYPSDIAVEWESNGQPEN | |
| | | NYKTTPPVLDSDGSFFLYSKLTVDKSRWQQGNVFSCSVMHEALHNHYTQ | |
| | | KSLSLSPGGGGGSGGGGSGGGGSGGGGSDIQMTQSPSSLSASVGDRVTI | |
| | | TCRASQDISNYLNWYQQKPGKAPKLLIYYTSRLRSGVPSRFSGSGSGTD | |
| | | FTLTISSLQPEDFATYYCQQGHTLPPTFGQGTKVEIKGGGGSGGGGSGG | |
| | | GGSGGGGSEVQLVQSGAEVKKPGASVKVSCKASGYTFTDSYMSWVRQAP | |
| | | GQGLEWIGDMYPDNGDSSYNQKFRERVTITRDTSTSTAYLELSSLRSED | |
| | | TAVYYCVLAPRWYFSVWGQGTLVTVSS | |
| | 2^{nd} | QVQLVQSGAEVKKPGASVKVSCKASGYTFTSYVMHWVRQKPGQGLEWIG | 573 |
| | chain | YINPYNEGTESTDKFKGRATMTSDKSTSTVYMELSSLRSEDTAVYYCAS | |
| | | IYYGYEGTYFGVWGQGTLVTVSSASTKGPSVFPLAPSSKSTSGGTAALG | |
| | | CLVKDYFPEPVTVSWNSGALTSGVHTFPAVLQSSGLYSLSSVVTVPSSS | |
| | | LGTQTYICNVNHKPSNTKVDKKVEPKSCGGGGSGGGGSGGGGSGGGGSQ | |
| | | AVVTQEPSLTVSPGGTVTLTCRSSTGAVTTSNYANWVQQKPGQAPRGLI | |
| | | GGTNKRAPWTPARFSGSLLGGKAALTITGAQAEDEADYYCALWYSNLWV | |
| | | FGGGTKLTVLGGGGSGGGGSGGGGSGGGGSEVQLVESGGGLVQPGGSLR | |
| | | LSCAASGFTFSTYAMNWVRQAPGKGLEWVGRIRSKYNNYATYYADSVKG | |
| | | RFTISRDDSKNSLYLQMNSLKTEDTAVYYCVRHGNFGNSYVSWFAYWGQ | |
| | | GTLVTVSSDKTHTCPPCPAPEAAGPSVFLFPPKPKDTLMISRTPEVTCV | |
| | | VVDVSHEDPEVKFNWYVDGVEVHNAKTKPREEQYNSTYRVVSVLTVLHQ | |
| | | DWLNGKEYKCKVSNKALPAPIEKTISKAKGQPREPQVYTLPPSREEMTK | |
| | | NQVSLSCAVKGFYPSDIAVEWESNGQPENNYKTTPPVLDSDGSFFLVSK | |
| | | LTVDKSRWQQGNVFSCSVMHEALHNRFTQKSLSLSPGGGGGSGGGGSGG | |
| | | GGSGGGGSDIQMTQSPSSLSASVGDRVTITCRASQDISNYLNWYQQKPG | |
| | | KAPKLLIYYTSRLRSGVPSRFSGSGSGTDFTLTISSLQPEDFATYYCQQ | |
| | | GHTLPPTFGQGTKVEIKGGGGSGGGGSGGGGSGGGGSEVQLVQSGAEVK | |
| | | KPGASVKVSCKASGYTFTDSYMSWVRQAPGQGLEWIGDMYPDNGDSSYN | |
| | | QKFRERVTITRDTSTSTAYLELSSLRSEDTAVYYCVLAPRWYFSVWGQG | |
| | | TLVTVSS | |
| | 3^{rd} | EIVLTQSPATLSLSPGERATLSCRASSSVSYMHWYQQKPGQAPRPWIYA | 574 |
| | chain | TSNLASGIPARFSGSRSGTDYTLTISSLEPEDFAVYYCQQWSSNTLTFG | |
| | | GGTKVEIKRTVAAPSVFIFPPSDEQLKSGTASVVCLLNNFYPREAKVQW | |
| | | KVDNALQSGNSQESVTEQDSKDSTYSLSSTLTLSKADYEKHKVYACEVT | |
| | | HQGLSSPVTKSFNRGEC | |
| Ly1926 | 1^{st} | QVQLVQSGAEVKKPGASVKVSCKASGYTFTSYVMHWVRQKPGQGLEWIG | 575 |
| | chain | YINPYNEGTESTDKFKGRATMTSDKSTSTVYMELSSLRSEDTAVYYCAS | |
| | | IYYGYEGTYFGVWGQGTLVTVSSASTKGPSVFPLAPSSKSTSGGTAALG | |
| | | CLVKDYFPEPVTVSWNSGALTSGVHTFPAVLQSSGLYSLSSVVTVPSSS | |
| | | LGTQTYICNVNHKPSNTKVDKKVEPKSCDKTHTCPPCPAPEAAGPSVFL | |
| | | FPPKPKDTLMISRTPEVTCVVVDVSHEDPEVKFNWYVDGVEVHNAKTKP | |
| | | REEQYNSTYRVVSVLTVLHQDWLNGKEYKCKVSNKALPAPIEKTISKAK | |
| | | GQPREPQVYTLPPSREEMTKNQVSLWCLVKGFYPSDIAVEWESNGQPEN | |
| | | NYKTTPPVLDSDGSFFLYSKLTVDKSRWQQGNVFSCSVMHEALHNHYTQ | |
| | | KSLSLSPGK | |
| | 2^{nd} | QVQLVQSGAEVKKPGASVKVSCKASGYTFTSYVMHWVRQKPGQGLEWIG | 576 |
| | chain | YINPYNEGTESTDKFKGRATMTSDKSTSTVYMELSSLRSEDTAVYYCAS | |
| | | IYYGYEGTYFGVWGQGTLVTVSSASTKGPSVFPLAPSSKSTSGGTAALG | |
| | | CLVKDYFPEPVTVSWNSGALTSGVHTFPAVLQSSGLYSLSSVVTVPSSS | |
| | | LGTQTYICNVNHKPSNTKVDKKVEPKSCGGGGSGGGGSGGGGSGGGGSQ | |
| | | AVVTQEPSLTVSPGGTVTLTCRSSTGAVTTSNYANWVQQKPGQAPRGLI | |
| | | GGTNKRAPWTPARFSGSLLGGKAALTITGAQAEDEADYYCALWYSNLWV | |
| | | FGGGTKLTVLGGGGSGGGGSGGGGSGGGGSEVQLVESGGGLVQPGGSLR | |
| | | LSCAASGFTFSTYAMNWVRQAPGKGLEWVGRIRSKYNNYATYYADSVKG | |
| | | RFTISRDDSKNSLYLQMNSLKTEDTAVYYCVRHGNFGNSYVSWFAYWGQ | |
| | | GTLVTVSSDKTHTCPPCPAPEAAGPSVFLFPPKPKDTLMISRTPEVTCV | |
| | | VVDVSHEDPEVKFNWYVDGVEVHNAKTKPREEQYNSTYRVVSVLTVLHQ | |
| | | DWLNGKEYKCKVSNKALPAPIEKTISKAKGQPREPQVYTLPPSREEMTK | |
| | | NQVSLSCAVKGFYPSDIAVEWESNGQPENNYKTTPPVLDSDGSFFLVSK | |
| | | LTVDKSRWQQGNVFSCSVMHEALHNRFTQKSLSLSPGGGGGSGGGGSGG | |
| | | GGSGGGGSEIVLTQSPATLSLSPGERATLSCRASKSVRTGMHWYQQKPG | |
| | | QAPRLLIYGASNLESGIPARFSGSGSGTDFTLTISSLEPEDFAVYYCQQ | |
| | | SWNHFTFGQGTKLEIKGGGGSGGGGSGGGGSGGGGSQVQLQESGPGLVK | |
| | | PSETLSLTCTVSGFSLTSYNVHWIRQPPGKGLEWIGVIWSGVRTDYNSV | |
| | | LKPRVTISVDTSKNQFSLKLSSVTAADTAVYYCARGTYDDNYHDVMDAW | |
| | | GQGTLVTVSS | |
| | 3rd | EIVLTQSPATLSLSPGERATLSCRASSSVSYMHWYQQKPGQAPRPWIYA | 577 |
| | chain | TSNLASGIPARFSGSRSGTDYTLTISSLEPEDFAVYYCQQWSSNTLTFG | |
| | | GGTKVEIKRTVAAPSVFIFPPSDEQLKSGTASVVCLLNNFYPREAKVQW | |
| | | KVDNALQSGNSQESVTEQDSKDSTYSLSSTLTLSKADYEKHKVYACEVT | |
| | | HQGLSSPVTKSFNRGEC | |
| Ly1927 | 1^{st} | QVQLVQSGAEVKKPGASVKVSCKASGYTFTSYVMHWVRQKPGQGLEWIG | 578 |
| | chain | YINPYNEGTESTDKFKGRATMTSDKSTSTVYMELSSLRSEDTAVYYCAS | |
| | | IYYGYEGTYFGVWGQGTLVTVSSASTKGPSVFPLAPSSKSTSGGTAALG | |
| | | CLVKDYFPEPVTVSWNSGALTSGVHTFPAVLQSSGLYSLSSVVTVPSSS | |
| | | LGTQTYICNVNHKPSNTKVDKKVEPKSCGGGGSGGGGSGGGGSGGGGSE | |
| | | VQLVESGGGLVQPGGSLRLSCAASGFTFSTYAMNWVRQAPGKGLEWVGR | |
| | | IRSKYNNYATYYADSVKGRFTISRDDSKNSLYLQMNSLKTEDTAVYYCV | |
| | | RHGNFGNSYVSWFAYWGQGTLVTVSSPAPEAAGPSVFLFPPKPKDTLMI | |
| | | SRTPEVTCVVVDVSHEDPEVKFNWYVDGVEVHNAKTKPREEQYNSTYRV | |
| | | VSVLTVLHQDWLNGKEYKCKVSNKALPAPIEKTISKAKGQPREPQVYTL | |
| | | PPSREEMTKNQVSLWCLVKGFYPSDIAVEWESNGQPENNYKTTPPVLDS | |
| | | DGSFFLYSKLTVDKSRWQQGNVFSCSVMHEALHNHYTQKSLSLSPGGGG | |
| | | GSGGGGSGGGGSGGGGSDIQMTQSPSSLSASVGDRVTITCRASQDISNY | |
| | | LNWYQQKPGKAPKLLIYYTSRLRSGVPSRFSGSGSGTDFTLTISSLQPE | |
| | | DFATYYCQQGHTLPPTFGQGTKVEIKGGGGSGGGGSGGGGSGGGGSEVQ | |
| | | LVQSGAEVKKPGASVKVSCKASGYTFTDSYMSWVRQAPGQGLEWIGDMY | |
| | | PDNGDSSYNQKFRERVTITRDTSTSTAYLELSSLRSEDTAVYYCVLAPR | |
| | | WYFSVWGQGTLVTVSS | |
| | 2^{nd} | QVQLVQSGAEVKKPGASVKVSCKASGYTFTSYVMHWVRQKPGQGLEWIG | 579 |
| | chain | YINPYNEGTESTDKFKGRATMTSDKSTSTVYMELSSLRSEDTAVYYCAS | |
| | | IYYGYEGTYFGVWGQGTLVTVSSASTKGPSVFPLAPSSKSTSGGTAALG | |
| | | CLVKDYFPEPVTVSWNSGALTSGVHTFPAVLQSSGLYSLSSVVTVPSSS | |
| | | LGTQTYICNVNHKPSNTKVDKKVEPKSCGGGGSGGGGSGGGGSGGGGSQ | |
| | | AVVTQEPSLTVSPGGTVTLTCRSSTGAVTTSNYANWVQQKPGQAPRGLI | |
| | | GGTNKRAPWTPARFSGSLLGGKAALTITGAQAEDEADYYCALWYSNLWV | |
| | | FGGGTKLTVLPAPEAAGPSVFLFPPKPKDTLMISRTPEVTCVVVDVSHE | |
| | | DPEVKFNWYVDGVEVHNAKTKPREEQYNSTYRVVSVLTVLHQDWLNGKE | |
| | | YKCKVSNKALPAPIEKTISKAKGQPREPQVYTLPPSREEMTKNQVSLSC | |
| | | AVKGFYPSDIAVEWESNGQPENNYKTTPPVLDSDGSFFLVSKLTVDKSR | |
| | | WQQGNVFSCSVMHEALHNRFTQKSLSLSPGGGGGSGGGGSGGGGSGGGG | |
| | | SDIQMTQSPSSLSASVGDRVTITCRASQDISNYLNWYQQKPGKAPKLLI | |
| | | YYTSRLRSGVPSRFSGSGSGTDFTLTISSLQPEDFATYYCQQGHTLPPT | |
| | | FGQGTKVEIKGGGGSGGGGSGGGGSGGGGSEVQLVQSGAEVKKPGASVK | |
| | | VSCKASGYTFTDSYMSWVRQAPGQGLEWIGDMYPDNGDSSYNQKFRERV | |
| | | TITRDTSTSTAYLELSSLRSEDTAVYYCVLAPRWYFSVWGQGTLVTVSS | |
| | 3^{rd} | EIVLTQSPATLSLSPGERATLSCRASSSVSYMHWYQQKPGQAPRPWIYA | 580 |
| | chain | TSNLASGIPARFSGSRSGTDYTLTISSLEPEDFAVYYCQQWSSNTLTFG | |
| | | GGTKVEIKRTVAAPSVFIFPPSDEQLKSGTASVVCLLNNFYPREAKVQW | |
| | | KVDNALQSGNSQESVTEQDSKDSTYSLSSTLTLSKADYEKHKVYACEVT | |
| | | HQGLSSPVTKSFNRGEC | |
| Ly1928 | 1^{st} | QVQLVQSGAEVKKPGASVKVSCKASGYTFTSYVMHWVRQKPGQGLEWIG | 581 |
| | chain | YINPYNEGTESTDKFKGRATMTSDKSTSTVYMELSSLRSEDTAVYYCAS | |
| | | IYYGYEGTYFGVWGQGTLVTVSSASTKGPSVFPLAPSSKSTSGGTAALG | |
| | | CLVKDYFPEPVTVSWNSGALTSGVHTFPAVLQSSGLYSLSSVVTVPSSS | |
| | | LGTQTYICNVNHKPSNTKVDKKVEPKSCGGGGSGGGGSGGGGSGGGGSE | |
| | | VQLVESGGGLVQPGGSLRLSCAASGFTFSTYAMNWVRQAPGKGLEWVGR | |
| | | IRSKYNNYATYYADSVKGRFTISRDDSKNSLYLQMNSLKTEDTAVYYCV | |
| | | RHGNFGNSYVSWFAYWGQGTLVTVSSPAPEAAGPSVFLFPPKPKDTLMI | |
| | | SRTPEVTCVVVDVSHEDPEVKFNWYVDGVEVHNAKTKPREEQYNSTYRV | |
| | | VSVLTVLHQDWLNGKEYKCKVSNKALPAPIEKTISKAKGQPREPQVYTL | |
| | | PPSREEMTKNQVSLWCLVKGFYPSDIAVEWESNGQPENNYKTTPPVLDS | |
| | | DGSFFLYSKLTVDKSRWQQGNVFSCSVMHEALHNHYTQKSLSLSPGGGG | |
| | | GSGGGGSGGGGSGGGGSDIQMTQSPSSLSASVGDRVTITCRASQDISNY | |
| | | LNWYQQKPGKAPKLLIYYTSRLRSGVPSRFSGSGSGTDFTLTISSLQPE | |
| | | DFATYYCQQGHTLPPTFGQGTKVEIKGGGGSGGGGSGGGGSGGGGSEVQ | |
| | | LVQSGAEVKKPGASVKVSCKASGYTFTDSYMSWVRQAPGQGLEWIGDMY | |
| | | PDNGDSSYNQKFRERVTITRDTSTSTAYLELSSLRSEDTAVYYCVLAPR | |
| | | WYFSVWGQGTLVTVSS | |
| | 2^{nd} | QVQLVQSGAEVKKPGASVKVSCKASGYTFTSYVMHWVRQKPGQGLEWIG | 582 |
| | chain | YINPYNEGTESTDKFKGRATMTSDKSTSTVYMELSSLRSEDTAVYYCAS | |
| | | IYYGYEGTYFGVWGQGTLVTVSSASTKGPSVFPLAPSSKSTSGGTAALG | |
| | | CLVKDYFPEPVTVSWNSGALTSGVHTFPAVLQSSGLYSLSSVVTVPSSS | |
| | | LGTQTYICNVNHKPSNTKVDKKVEPKSCGGGGSGGGGSGGGGSGGGGSQ | |
| | | AVVTQEPSLTVSPGGTVTLTCRSSTGAVTTSNYANWVQQKPGQAPRGLI | |
| | | GGTNKRAPWTPARFSGSLLGGKAALTITGAQAEDEADYYCALWYSNLWV | |
| | | FGGGTKLTVLPAPEAAGPSVFLFPPKPKDTLMISRTPEVTCVVVDVSHE | |
| | | DPEVKFNWYVDGVEVHNAKTKPREEQYNSTYRVVSVLTVLHQDWLNGKE | |
| | | YKCKVSNKALPAPIEKTISKAKGQPREPQVYTLPPSREEMTKNQVSLSC | |
| | | AVKGFYPSDIAVEWESNGQPENNYKTTPPVLDSDGSFFLVSKLTVDKSR | |
| | | WQQGNVFSCSVMHEALHNRFTQKSLSLSPGK | |
| | 3^{rd} | EIVLTQSPATLSLSPGERATLSCRASSSVSYMHWYQQKPGQAPRPWIYA | 583 |
| | chain | TSNLASGIPARFSGSRSGTDYTLTISSLEPEDFAVYYCQQWSSNTLTFG | |
| | | GGTKVEIKRTVAAPSVFIFPPSDEQLKSGTASVVCLLNNFYPREAKVQW | |
| | | KVDNALQSGNSQESVTEQDSKDSTYSLSSTLTLSKADYEKHKVYACEVT | |
| | | HQGLSSPVTKSFNRGEC | |
| Ly1929 | 1^{st} | QVQLVQSGAEVKKPGASVKVSCKASGYTFTSYVMHWVRQKPGQGLEWIG | 584 |
| | chain | YINPYNEGTESTDKFKGRATMTSDKSTSTVYMELSSLRSEDTAVYYCAS | |
| | | IYYGYEGTYFGVWGQGTLVTVSSASTKGPSVFPLAPSSKSTSGGTAALG | |
| | | CLVKDYFPEPVTVSWNSGALTSGVHTFPAVLQSSGLYSLSSVVTVPSSS | |
| | | LGTQTYICNVNHKPSNTKVDKKVEPKSCGGGGSGGGGSGGGGSGGGGSE | |
| | | VQLVESGGGLVQPGGSLRLSCAASGFTFSTYAMNWVRQAPGKGLEWVGR | |
| | | IRSKYNNYATYYADSVKGRFTISRDDSKNSLYLQMNSLKTEDTAVYYCV | |
| | | RHGNFGNSYVSWFAYWGQGTLVTVSSPAPEAAGPSVFLFPPKPKDTLMI | |
| | | SRTPEVTCVVVDVSHEDPEVKFNWYVDGVEVHNAKTKPREEQYNSTYRV | |
| | | VSVLTVLHQDWLNGKEYKCKVSNKALPAPIEKTISKAKGQPREPQVYTL | |
| | | PPSREEMTKNQVSLWCLVKGFYPSDIAVEWESNGQPENNYKTTPPVLDS | |
| | | DGSFFLYSKLTVDKSRWQQGNVFSCSVMHEALHNHYTQKSLSLSPGK | |
| | 2^{nd} | QVQLVQSGAEVKKPGASVKVSCKASGYTFTSYVMHWVRQKPGQGLEWIG | 585 |
| | chain | YINPYNEGTESTDKFKGRATMTSDKSTSTVYMELSSLRSEDTAVYYCAS | |
| | | IYYGYEGTYFGVWGQGTLVTVSSASTKGPSVFPLAPSSKSTSGGTAALG | |
| | | CLVKDYFPEPVTVSWNSGALTSGVHTFPAVLQSSGLYSLSSVVTVPSSS | |
| | | LGTQTYICNVNHKPSNTKVDKKVEPKSCGGGGSGGGGSGGGGSGGGGSQ | |
| | | AVVTQEPSLTVSPGGTVTLTCRSSTGAVTTSNYANWVQQKPGQAPRGLI | |
| | | GGTNKRAPWTPARFSGSLLGGKAALTITGAQAEDEADYYCALWYSNLWV | |
| | | FGGGTKLTVLPAPEAAGPSVFLFPPKPKDTLMISRTPEVTCVVVDVSHE | |
| | | DPEVKFNWYVDGVEVHNAKTKPREEQYNSTYRVVSVLTVLHQDWLNGKE | |
| | | YKCKVSNKALPAPIEKTISKAKGQPREPQVYTLPPSREEMTKNQVSLSC | |
| | | AVKGFYPSDIAVEWESNGQPENNYKTTPPVLDSDGSFFLVSKLTVDKSR | |
| | | WQQGNVFSCSVMHEALHNRFTQKSLSLSPGGGGGSGGGGSGGGGSGGGG | |
| | | SDIQMTQSPSSLSASVGDRVTITCRASQDISNYLNWYQQKPGKAPKLLI | |
| | | YYTSRLRSGVPSRFSGSGSGTDFTLTISSLQPEDFATYYCQQGHTLPPT | |
| | | FGQGTKVEIKGGGGSGGGGSGGGGSGGGGSEVQLVQSGAEVKKPGASVK | |
| | | VSCKASGYTFTDSYMSWVRQAPGQGLEWIGDMYPDNGDSSYNQKFRERV | |
| | | TITRDTSTSTAYLELSSLRSEDTAVYYCVLAPRWYFSVWGQGTLVTVSS | |
| | 3^{rd} | EIVLTQSPATLSLSPGERATLSCRASSSVSYMHWYQQKPGQAPRPWIYA | 586 |
| | chain | TSNLASGIPARFSGSRSGTDYTLTISSLEPEDFAVYYCQQWSSNTLTFG | |
| | | GGTKVEIKRTVAAPSVFIFPPSDEQLKSGTASVVCLLNNFYPREAKVQW | |
| | | KVDNALQSGNSQESVTEQDSKDSTYSLSSTLTLSKADYEKHKVYACEVT | |
| | | HQGLSSPVTKSFNRGEC | |
| Ly1930 | 1^{st} | QVQLVQSGAEVKKPGASVKVSCKASGYTFTSYVMHWVRQKPGQGLEWIG | 587 |
| | chain | YINPYNEGTESTDKFKGRATMTSDKSTSTVYMELSSLRSEDTAVYYCAS | |
| | | IYYGYEGTYFGVWGQGTLVTVSSASTKGPSVFPLAPSSKSTSGGTAALG | |
| | | CLVKDYFPEPVTVSWNSGALTSGVHTFPAVLQSSGLYSLSSVVTVPSSS | |
| | | LGTQTYICNVNHKPSNTKVDKKVEPKSCGGGGSGGGGSGGGGSGGGGSE | |
| | | VQLVESGGGLVQPGGSLRLSCAASGFTFSTYAMNWVRQAPGKGLEWVGR | |
| | | IRSKYNNYATYYADSVKGRFTISRDDSKNSLYLQMNSLKTEDTAVYYCV | |
| | | RHGNFGNSYVSWFAYWGQGTLVTVSSPAPEAAGPSVFLFPPKPKDTLMI | |
| | | SRTPEVTCVVVDVSHEDPEVKFNWYVDGVEVHNAKTKPREEQYNSTYRV | |
| | | VSVLTVLHQDWLNGKEYKCKVSNKALPAPIEKTISKAKGQPREPQVYTL | |
| | | PPSREEMTKNQVSLWCLVKGFYPSDIAVEWESNGQPENNYKTTPPVLDS | |
| | | DGSFFLYSKLTVDKSRWQQGNVFSCSVMHEALHNHYTQKSLSLSPGGGG | |
| | | GSGGGGSGGGGSGGGGSEVQLVQSGAEVKKPGASVKVSCKASGYTFTDS | |
| | | YMSWVRQAPGQGLEWIGDMYPDNGDSSYNQKFRERVTITRDTSTSTAYL | |
| | | ELSSLRSEDTAVYYCVLAPRWYFSVWGQGTLVTVSS | |
| | 2^{nd} | QVQLVQSGAEVKKPGASVKVSCKASGYTFTSYVMHWVRQKPGQGLEWIG | 588 |
| | chain | YINPYNEGTESTDKFKGRATMTSDKSTSTVYMELSSLRSEDTAVYYCAS | |
| | | IYYGYEGTYFGVWGQGTLVTVSSASTKGPSVFPLAPSSKSTSGGTAALG | |
| | | CLVKDYFPEPVTVSWNSGALTSGVHTFPAVLQSSGLYSLSSVVTVPSSS | |
| | | LGTQTYICNVNHKPSNTKVDKKVEPKSCGGGGSGGGGSGGGGSGGGGSQ | |
| | | AVVTQEPSLTVSPGGTVTLTCRSSTGAVTTSNYANWVQQKPGQAPRGLI | |
| | | GGTNKRAPWTPARFSGSLLGGKAALTITGAQAEDEADYYCALWYSNLWV | |
| | | FGGGTKLTVLPAPEAAGPSVFLFPPKPKDTLMISRTPEVTCVVVDVSHE | |
| | | DPEVKFNWYVDGVEVHNAKTKPREEQYNSTYRVVSVLTVLHQDWLNGKE | |
| | | YKCKVSNKALPAPIEKTISKAKGQPREPQVYTLPPSREEMTKNQVSLSC | |
| | | AVKGFYPSDIAVEWESNGQPENNYKTTPPVLDSDGSFFLVSKLTVDKSR | |
| | | WQQGNVFSCSVMHEALHNRFTQKSLSLSPGGGGGSGGGGSGGGGSGGGG | |
| | | SDIQMTQSPSSLSASVGDRVTITCRASQDISNYLNWYQQKPGKAPKLLI | |
| | | YYTSRLRSGVPSRFSGSGSGTDFTLTISSLQPEDFATYYCQQGHTLPPT | |
| | | FGQGTKVEIK | |
| | 3^{rd} | EIVLTQSPATLSLSPGERATLSCRASSSVSYMHWYQQKPGQAPRPWIYA | 589 |
| | chain | TSNLASGIPARFSGSRSGTDYTLTISSLEPEDFAVYYCQQWSSNTLTFG | |
| | | GGTKVEIKRTVAAPSVFIFPPSDEQLKSGTASVVCLLNNFYPREAKVQW | |
| | | KVDNALQSGNSQESVTEQDSKDSTYSLSSTLTLSKADYEKHKVYACEVT | |
| | | HQGLSSPVTKSFNRGEC | |
| Ly1931 | 1^{st} | QVQLVQSGAEVKKPGASVKVSCKASGYTFTSYVMHWVRQKPGQGLEWIG | 590 |
| | chain | YINPYNEGTESTDKFKGRATMTSDKSTSTVYMELSSLRSEDTAVYYCAS | |
| | | IYYGYEGTYFGVWGQGTLVTVSSASTKGPSVFPLAPSSKSTSGGTAALG | |
| | | CLVKDYFPEPVTVSWNSGALTSGVHTFPAVLQSSGLYSLSSVVTVPSSS | |
| | | LGTQTYICNVNHKPSNTKVDKKVEPKSCGGGGSGGGGSGGGGSGGGGSE | |
| | | VQLVESGGGLVQPGGSLRLSCAASGFTFSTYAMNWVRQAPGKGLEWVGR | |
| | | IRSKYNNYATYYADSVKGRFTISRDDSKNSLYLQMNSLKTEDTAVYYCV | |
| | | RHGNFGNSYVSWFAYWGQGTLVTVSSPAPEAAGPSVFLFPPKPKDTLMI | |
| | | SRTPEVTCVVVDVSHEDPEVKFNWYVDGVEVHNAKTKPREEQYNSTYRV | |
| | | VSVLTVLHQDWLNGKEYKCKVSNKALPAPIEKTISKAKGQPREPQVYTL | |
| | | PPSREEMTKNQVSLWCLVKGFYPSDIAVEWESNGQPENNYKTTPPVLDS | |
| | | DGSFFLYSKLTVDKSRWQQGNVFSCSVMHEALHNHYTQKSLSLSPGK | |
| | 2^{nd} | QVQLVQSGAEVKKPGASVKVSCKASGYTFTSYVMHWVRQKPGQGLEWIG | 591 |
| | chain | YINPYNEGTESTDKFKGRATMTSDKSTSTVYMELSSLRSEDTAVYYCAS | |
| | | IYYGYEGTYFGVWGQGTLVTVSSASTKGPSVFPLAPSSKSTSGGTAALG | |
| | | CLVKDYFPEPVTVSWNSGALTSGVHTFPAVLQSSGLYSLSSVVTVPSSS | |
| | | LGTQTYICNVNHKPSNTKVDKKVEPKSCGGGGSGGGGSGGGGSGGGGSQ | |
| | | AVVTQEPSLTVSPGGTVTLTCRSSTGAVTTSNYANWVQQKPGQAPRGLI | |
| | | GGTNKRAPWTPARFSGSLLGGKAALTITGAQAEDEADYYCALWYSNLWV | |
| | | FGGGTKLTVLPAPEAAGPSVFLFPPKPKDTLMISRTPEVTCVVVDVSHE | |
| | | DPEVKFNWYVDGVEVHNAKTKPREEQYNSTYRVVSVLTVLHQDWLNGKE | |
| | | YKCKVSNKALPAPIEKTISKAKGQPREPQVYTLPPSREEMTKNQVSLSC | |
| | | AVKGFYPSDIAVEWESNGQPENNYKTTPPVLDSDGSFFLVSKLTVDKSR | |
| | | WQQGNVFSCSVMHEALHNRFTQKSLSLSPGK | |
| | 3^{rd} | EIVLTQSPATLSLSPGERATLSCRASSSVSYMHWYQQKPGQAPRPWIYA | 592 |
| | chain | TSNLASGIPARFSGSRSGTDYTLTISSLEPEDFAVYYCQQWSSNTLTFG | |
| | | GGTKVEIKRTVAAPSVFIFPPSDEQLKSGTASVVCLLNNFYPREAKVQW | |
| | | KVDNALQSGNSQESVTEQDSKDSTYSLSSTLTLSKADYEKHKVYACEVT | |
| | | HQGLSSPVTKSFNRGECGGGGSGGGGSGGGGSGGGGSDIQMTQSPSSLS | |
| | | ASVGDRVTITCRASQDISNYLNWYQQKPGKAPKLLIYYTSRLRSGVPSR | |
| | | FSGSGSGTDFTLTISSLQPEDFATYYCQQGHTLPPTFGQGTKVEIKGGG | |
| | | GSGGGGSGGGGSGGGGSEVQLVQSGAEVKKPGASVKVSCKASGYTFTDS | |
| | | YMSWVRQAPGQGLEWIGDMYPDNGDSSYNQKFRERVTITRDTSTSTAYL | |
| | | ELSSLRSEDTAVYYCVLAPRWYFSVWGQGTLVTVSS | |
| Ly1932 | 1^{st} | QVQLVQSGAEVKKPGASVKVSCKASGYTFTSYVMHWVRQKPGQGLEWIG | 593 |
| | chain | YINPYNEGTESTDKFKGRATMTSDKSTSTVYMELSSLRSEDTAVYYCAS | |
| | | IYYGYEGTYFGVWGQGTLVTVSSASTKGPSVFPLAPSSKSTSGGTAALG | |
| | | CLVKDYFPEPVTVSWNSGALTSGVHTFPAVLQSSGLYSLSSVVTVPSSS | |
| | | LGTQTYICNVNHKPSNTKVDKKVEPKSCDKTHTCPPCPAPEAAGPSVFL | |
| | | FPPKPKDTLMISRTPEVTCVVVDVSHEDPEVKFNWYVDGVEVHNAKTKP | |
| | | REEQYNSTYRVVSVLTVLHQDWLNGKEYKCKVSNKALPAPIEKTISKAK | |
| | | GQPREPQVYTLPPSREEMTKNQVSLWCLVKGFYPSDIAVEWESNGQPEN | |
| | | NYKTTPPVLDSDGSFFLYSKLTVDKSRWQQGNVFSCSVMHEALHNHYTQ | |
| | | KSLSLSPGGGGGSGGGGSGGGGSGGGGSDIQMTQSPSSLSASVGDRVTI | |
| | | TCRASQDISNYLNWYQQKPGKAPKLLIYYTSRLRSGVPSRFSGSGSGTD | |
| | | FTLTISSLQPEDFATYYCQQGHTLPPTFGQGTKVEIKGGGGSGGGGSGG | |
| | | GGSGGGGSEVQLVQSGAEVKKPGASVKVSCKASGYTFTDSYMSWVRQAP | |
| | | GQGLEWIGDMYPDNGDSSYNQKFRERVTITRDTSTSTAYLELSSLRSED | |
| | | TAVYYCVLAPRWYFSVWGQGTLVTVSS | |
| | 2^{nd} | QVQLVQSGAEVKKPGASVKVSCKASGYTFTSYVMHWVRQKPGQGLEWIG | 594 |
| | chain | YINPYNEGTESTDKFKGRATMTSDKSTSTVYMELSSLRSEDTAVYYCAS | |
| | | IYYGYEGTYFGVWGQGTLVTVSSASTKGPSVFPLAPSSKSTSGGTAALG | |
| | | CLVKDYFPEPVTVSWNSGALTSGVHTFPAVLQSSGLYSLSSVVTVPSSS | |
| | | LGTQTYICNVNHKPSNTKVDKKVEPKSCDKTHTCPPCPAPEAAGPSVFL | |
| | | FPPKPKDTLMISRTPEVTCVVVDVSHEDPEVKFNWYVDGVEVHNAKTKP | |
| | | REEQYNSTYRVVSVLTVLHQDWLNGKEYKCKVSNKALPAPIEKTISKAK | |
| | | GQPREPQVYTLPPSREEMTKNQVSLSCAVKGFYPSDIAVEWESNGQPEN | |
| | | NYKTTPPVLDSDGSFFLVSKLTVDKSRWQQGNVFSCSVMHEALHNRFTQ | |
| | | KSLSLSPGGGGGSGGGGSGGGGSGGGGSDIQMTQSPSTLSASVGDRVTI | |
| | | TCSASSSVSYMNWYQQKPGKAPKLLIYDTSKLASGVPSRFSGSGSGTEF | |
| | | TLTISSLQPDDFATYYCQQWSSNPFTFGQGTKLEIKGGGGSGGGGSGGG | |
| | | GSGGGGSQVQLVQSGAEVKKPGASVKVSCKASGYTFTRYTMHWVRQAPG | |
| | | QGLEWMGYINPSRGYTNYNQKFKDRVTMTRDTSTSTVYMELSSLRSEDT | |
| | | AVYYCARYYDDHYCLDYWGQGTLVTVSS | |
| | 3^{rd} | EIVLTQSPATLSLSPGERATLSCRASSSVSYMHWYQQKPGQAPRPWIYA | 595 |
| | chain | TSNLASGIPARFSGSRSGTDYTLTISSLEPEDFAVYYCQQWSSNTLTFG | |
| | | GGTKVEIKRTVAAPSVFIFPPSDEQLKSGTASVVCLLNNFYPREAKVQW | |
| | | KVDNALQSGNSQESVTEQDSKDSTYSLSSTLTLSKADYEKHKVYACEVT | |
| | | HQGLSSPVTKSFNRGEC | |
| Ly1934 | 1^{st} | QVQLVQSGAEVKKPGASVKVSCKASGYTFTSYVMHWVRQKPGQGLEWIG | 596 |
| | chain | YINPYNEGTESTDKFKGRATMTSDKSTSTVYMELSSLRSEDTAVYYCAS | |
| | | IYYGYEGTYFGVWGQGTLVTVSSASTKGPSVFPLAPSSKSTSGGTAALG | |
| | | CLVKDYFPEPVTVSWNSGALTSGVHTFPAVLQSSGLYSLSSVVTVPSSS | |
| | | LGTQTYICNVNHKPSNTKVDKKVEPKSCGGGGSGGGGSGGGGSGGGGSE | |
| | | VQLVESGGGLVQPGGSLRLSCAASGFTFSTYAMNWVRQAPGKGLEWVGR | |
| | | IRSKYNNYATYYADSVKGRFTISRDDSKNSLYLQMNSLKTEDTAVYYCV | |
| | | RHGNFGNSYVSWFAYWGQGTLVTVSSPAPEAAGPSVFLFPPKPKDTLMI | |
| | | SRTPEVTCVVVDVSHEDPEVKFNWYVDGVEVHNAKTKPREEQYNSTYRV | |
| | | VSVLTVLHQDWLNGKEYKCKVSNKALPAPIEKTISKAKGQPREPQVYTL | |
| | | PPSREEMTKNQVSLWCLVKGFYPSDIAVEWESNGQPENNYKTTPPVLDS | |
| | | DGSFFLYSKLTVDKSRWQQGNVFSCSVMHEALHNHYTQKSLSLSPGK | |
| | 2^{nd} | QVQLVQSGAEVKKPGASVKVSCKASGYTFTSYVMHWVRQKPGQGLEWIG | 597 |
| | chain | YINPYNEGTESTDKFKGRATMTSDKSTSTVYMELSSLRSEDTAVYYCAS | |
| | | IYYGYEGTYFGVWGQGTLVTVSSASTKGPSVFPLAPSSKSTSGGTAALG | |
| | | CLVKDYFPEPVTVSWNSGALTSGVHTFPAVLQSSGLYSLSSVVTVPSSS | |
| | | LGTQTYICNVNHKPSNTKVDKKVEPKSCGGGGSGGGGSGGGGSGGGGSE | |
| | | VQLVQSGAEVKKPGASVKVSCKASGYTFTDSYMSWVRQAPGQGLEWIGD | |
| | | MYPDNGDSSYNQKFRERVTITRDTSTSTAYLELSSLRSEDTAVYYCVLA | |
| | | PRWYFSVWGQGTLVTVSSASVAAPSVFIFPPSDEQLKSGTASVVCLLNN | |
| | | FYPREAKVQWKVDNALQSGNSQESVTEQDSKDSTYSLSSTLTLSKADYE | |
| | | KHKVYACEVTHQGLSSPVTKSFNRGECGGGGSGGGGSGGGGSGGGGSQA | |
| | | VVTQEPSLTVSPGGTVTLTCRSSTGAVTTSNYANWVQQKPGQAPRGLIG | |
| | | GTNKRAPWTPARFSGSLLGGKAALTITGAQAEDEADYYCALWYSNLWVE | |
| | | GGGTKLTVLPAPEAAGPSVFLFPPKPKDTLMISRTPEVTCVVVDVSHED | |
| | | PEVKFNWYVDGVEVHNAKTKPREEQYNSTYRVVSVLTVLHQDWLNGKEY | |
| | | KCKVSNKALPAPIEKTISKAKGQPREPQVYTLPPSREEMTKNQVSLSCA | |
| | | VKGFYPSDIAVEWESNGQPENNYKTTPPVLDSDGSFFLVSKLTVDKSRW | |
| | | QQGNVFSCSVMHEALHNRFTQKSLSLSPGK | |
| | 3^{rd} | EIVLTQSPATLSLSPGERATLSCRASSSVSYMHWYQQKPGQAPRPWIYA | 598 |
| | chain | TSNLASGIPARFSGSRSGTDYTLTISSLEPEDFAVYYCQQWSSNTLTFG | |
| | | GGTKVEIKRTVAAPSVFIFPPSDEQLKSGTASVVCLLNNFYPREAKVQW | |
| | | KVDNALQSGNSQESVTEQDSKDSTYSLSSTLTLSKADYEKHKVYACEVT | |
| | | HQGLSSPVTKSFNRGEC | |
| | 4^{th} | DIQMTQSPSSLSASVGDRVTITCRASQDISNYLNWYQQKPGKAPKLLIY | 599 |
| | chain | YTSRLRSGVPSRFSGSGSGTDFTLTISSLOPEDFATYYCQQGHTLPPTF | |
| | | GQGTKVEIKSSASTKGPSVFPLAPSSKSTSGGTAALGCLVKDYFPEPVT | |
| | | VSWNSGALTSGVHTFPAVLOSSGLYSLSSVVTVPSSSLGTQTYICNVNH | |
| | | KPSNTKVDKKVEPKSC | |

### Characterization of Anti-B7H3/CD3/OX40 Tri-Specific Antibodies

[0359] These tri-specific antibodies are evaluated for their in vitro and in vivo activity, including binding to target antigen (B37H3, CD3 and OX40), agonistic activity in CD3 and OX40 reporter assay system, activation of immune cells, anti-tumor activity in mouse models.

### Example 12: Anti-B7H3/CD3/GITR Tri-Specific Antibodies

[0360] Anti-B7H3/CD3/GITR tri-specific were produced using the same anti-B37H3 and anti-CD3 parent clones disclosed above and the anti-GITR parent antibody GITR Ab1. The sequences of the parent antibody clones are provided in Table 1 above.

[0361] cDNAs encoding the V_{H} and V_{L} chains of these parent antibodies were used as the starting materials for making the tri-specific antibodies. CHO-cell transient expression was carried out with plasmids configured for expressing polypeptide chains of the tri-specific antibodies. These antibodies were purified by protein A affinity chromatography.

[0362] The amino acid sequences of the polypeptide chains of the tri-specific antibodies are provided in Table 12 below:

TABLE 12
Exemplary Anti-B7H3/CD3/GITR Tri-Specific Antibodies

| | | | SED ID |
|---|---|---|---|
| Antibody Clones | | Amino acid sequence | NO: |
| Ly1919 | 1^{st} | QVQLVQSGAEVKKPGASVKVSCKASGYTFTSYVMHWVRQKPGQGLEWIG | 600 |
| | chain | YINPYNEGTESTDKFKGRATMTSDKSTSTVYMELSSLRSEDTAVYYCAS | |
| | | IYYGYEGTYFGVWGQGTLVTVSSASTKGPSVFPLAPSSKSTSGGTAALG | |
| | | CLVKDYFPEPVTVSWNSGALTSGVHTFPAVLQSSGLYSLSSVVTVPSSS | |
| | | LGTQTYICNVNHKPSNTKVDKKVEPKSCGGGGSGGGGSGGGGSGGGGSE | |
| | | VQLVESGGGLVQPGGSLRLSCAASGFTFSTYAMNWVRQAPGKGLEWVGR | |
| | | IRSKYNNYATYYADSVKGRFTISRDDSKNSLYLQMNSLKTEDTAVYYCV | |
| | | RHGNFGNSYVSWFAYWGQGTLVTVSSPAPELLGPSVFLFPPKPKDTLMI | |
| | | SRTPEVTCVVVDVSHEDPEVKFNWYVDGVEVHNAKTKPREEQYNSTYRV | |
| | | VSVLTVLHQDWLNGKEYKCKVSNKALPAPIEKTISKAKGQPREPQVYTL | |
| | | PPSREEMTKNQVSLWCLVKGFYPSDIAVEWESNGQPENNYKTTPPVLDS | |
| | | DGSFFLYSKLTVDKSRWQQGNVFSCSVMHEALHNHYTQKSLSLSPGK | |
| | 2^{nd} | EVQLVQSGAEVKKPGASVKVSCKASGYTFTDSYMSWVRQAPGQGLEWIG | 601 |
| | chain | DMYPDNGDSSYNQKFRERVTITRDTSTSTAYLELSSLRSEDTAVYYCVL | |
| | | APRWYFSVWGQGTLVTVSSASVAAPSVFIFPPSDEQLKSGTASVVCLLN | |
| | | NFYPREAKVQWKVDNALQSGNSQESVTEQDSKDSTYSLSSTLTLSKADY | |
| | | EKHKVYACEVTHQGLSSPVTKSFNRGECGGGGSGGGGSGGGGSGGGGSQ | |
| | | AVVTQEPSLTVSPGGTVTLTCRSSTGAVTTSNYANWVQQKPGQAPRGLI | |
| | | GGTNKRAPWTPARFSGSLLGGKAALTITGAQAEDEADYYCALWYSNLWV | |
| | | FGGGTKLTVLPAPELLGPSVFLFPPKPKDTLMISRTPEVTCVVVDVSHE | |
| | | DPEVKFNWYVDGVEVHNAKTKPREEQYNSTYRVVSVLTVLHQDWLNGKE | |
| | | YKCKVSNKALPAPIEKTISKAKGQPREPQVYTLPPSREEMTKNQVSLSC | |
| | | AVKGFYPSDIAVEWESNGQPENNYKTTPPVLDSDGSFFLVSKLTVDKSR | |
| | | WQQGNVFSCSVMHEALHNRFTQKSLSLSPGK | |
| | 3^{rd} | EIVLTQSPATLSLSPGERATLSCRASSSVSYMHWYQQKPGQAPRPWIYA | 602 |
| | chain | TSNLASGIPARFSGSRSGTDYTLTISSLEPEDFAVYYCQQWSSNTLTFG | |
| | | GGTKVEIKRTVAAPSVFIFPPSDEQLKSGTASVVCLLNNFYPREAKVQW | |
| | | KVDNALQSGNSQESVTEQDSKDSTYSLSSTLTLSKADYEKHKVYACEVT | |
| | | HQGLSSPVTKSFNRGEC | |
| | 4^{th} | DIQMTQSPSSLSASVGDRVTITCRASQDISNYLNWYQQKPGKAPKLLIY | 603 |
| | chain | YTSRLRSGVPSRFSGSGSGTDFTLTISSLQPEDFATYYCQQGHTLPPTF | |
| | | GQGTKVEIKSSASTKGPSVFPLAPSSKSTSGGTAALGCLVKDYFPEPVT | |
| | | VSWNSGALTSGVHTFPAVLQSSGLYSLSSVVTVPSSSLGTQTYICNVNH | |
| | | KPSNTKVDKKVEPKSC | |
| Ly1920 | 1^{st} | QVQLVQSGAEVKKPGASVKVSCKASGYTFTSYVMHWVRQKPGQGLEWIG | 604 |
| | chain | YINPYNEGTESTDKFKGRATMTSDKSTSTVYMELSSLRSEDTAVYYCAS | |
| | | IYYGYEGTYFGVWGQGTLVTVSSASTKGPSVFPLAPSSKSTSGGTAALG | |
| | | CLVKDYFPEPVTVSWNSGALTSGVHTFPAVLQSSGLYSLSSVVTVPSSS | |
| | | LGTQTYICNVNHKPSNTKVDKKVEPKSCDKTHTCPPCPAPEAAGPSVEL | |
| | | FPPKPKDTLMISRTPEVTCVVVDVSHEDPEVKFNWYVDGVEVHNAKTKP | |
| | | REEQYNSTYRVVSVLTVLHQDWLNGKEYKCKVSNKALPAPIEKTISKAK | |
| | | GQPREPQVYTLPPSREEMTKNQVSLWCLVKGFYPSDIAVEWESNGQPEN | |
| | | NYKTTPPVLDSDGSFFLYSKLTVDKSRWQQGNVFSCSVMHEALHNHYTQ | |
| | | KSLSLSPGGGGGSGGGGSGGGGSGGGGSDIQMTQSPSSLSASVGDRVTI | |
| | | TCRASQDISNYLNWYQQKPGKAPKLLIYYTSRLRSGVPSRFSGSGSGTD | |
| | | FTLTISSLQPEDFATYYCQQGHTLPPTFGQGTKVEIKGGGGSGGGGSGG | |
| | | GGSGGGGSEVQLVQSGAEVKKPGASVKVSCKASGYTFTDSYMSWVRQAP | |
| | | GQGLEWIGDMYPDNGDSSYNQKFRERVTITRDTSTSTAYLELSSLRSED | |
| | | TAVYYCVLAPRWYFSVWGQGTLVTVSS | |
| | 2^{nd} | QVQLVQSGAEVKKPGASVKVSCKASGYTFTSYVMHWVRQKPGQGLEWIG | 605 |
| | chain | YINPYNEGTESTDKFKGRATMTSDKSTSTVYMELSSLRSEDTAVYYCAS | |
| | | IYYGYEGTYFGVWGQGTLVTVSSASTKGPSVFPLAPSSKSTSGGTAALG | |
| | | CLVKDYFPEPVTVSWNSGALTSGVHTFPAVLQSSGLYSLSSVVTVPSSS | |
| | | LGTQTYICNVNHKPSNTKVDKKVEPKSCGGGGSGGGGSGGGGSGGGGSE | |
| | | VQLVESGGGLVQPGGSLRLSCAASGFTFSTYAMNWVRQAPGKGLEWVGR | |
| | | IRSKYNNYATYYADSVKGRFTISRDDSKNSLYLQMNSLKTEDTAVYYCV | |
| | | RHGNFGNSYVSWFAYWGQGTLVTVSSASVAAPSVFIFPPSDEQLKSGTA | |
| | | SVVCLLNNFYPREAKVQWKVDNALQSGNSQESVTEQDSKDSTYSLSSTL | |
| | | TLSKADYEKHKVYACEVTHQGLSSPVTKSFNRGECDKTHTCPPCPAPEA | |
| | | AGPSVFLFPPKPKDTLMISRTPEVTCVVVDVSHEDPEVKFNWYVDGVEV | |
| | | HNAKTKPREEQYNSTYRVVSVLTVLHQDWLNGKEYKCKVSNKALPAPIE | |
| | | KTISKAKGQPREPQVYTLPPSREEMTKNQVSLSCAVKGFYPSDIAVEWE | |
| | | SNGQPENNYKTTPPVLDSDGSFFLVSKLTVDKSRWQQGNVFSCSVMHEA | |
| | | LHNRFTQKSLSLSPGGGGGSGGGGSGGGGSGGGGSDIQMTQSPSSLSAS | |
| | | VGDRVTITCRASQDISNYLNWYQQKPGKAPKLLIYYTSRLRSGVPSRFS | |
| | | GSGSGTDFTLTISSLQPEDFATYYCQQGHTLPPTFGQGTKVEIKGGGGS | |
| | | GGGGSGGGGSGGGGSEVQLVQSGAEVKKPGASVKVSCKASGYTFTDSYM | |
| | | SWVRQAPGQGLEWIGDMYPDNGDSSYNQKFRERVTITRDTSTSTAYLEL | |
| | | SSLRSEDTAVYYCVLAPRWYFSVWGQGTLVTVSS | |
| | 3^{rd} | EIVLTQSPATLSLSPGERATLSCRASSSVSYMHWYQQKPGQAPRPWIYA | 606 |
| | chain | TSNLASGIPARFSGSRSGTDYTLTISSLEPEDFAVYYCQQWSSNTLTFG | |
| | | GGTKVEIKRTVAAPSVFIFPPSDEQLKSGTASVVCLLNNFYPREAKVQW | |
| | | KVDNALQSGNSQESVTEQDSKDSTYSLSSTLTLSKADYEKHKVYACEVT | |
| | | HQGLSSPVTKSFNRGEC | |
| | 4^{th} | QAVVTQEPSLTVSPGGTVTLTCRSSTGAVTTSNYANWVQQKPGQAPRGL | 607 |
| | chain | IGGTNKRAPWTPARFSGSLLGGKAALTITGAQAEDEADYYCALWYSNLW | |
| | | VFGGGTKLTVLSSASTKGPSVFPLAPSSKSTSGGTAALGCLVKDYFPEP | |
| | | VTVSWNSGALTSGVHTFPAVLQSSGLYSLSSVVTVPSSSLGTQTYICNV | |
| | | NHKPSNTKVDKKVEPKSC | |
| Ly1921 | 1^{st} | QVQLVQSGAEVKKPGASVKVSCKASGYTFTSYVMHWVRQKPGQGLEWIG | 608 |
| | chain | YINPYNEGTESTDKFKGRATMTSDKSTSTVYMELSSLRSEDTAVYYCAS | |
| | | IYYGYEGTYFGVWGQGTLVTVSSASTKGPSVFPLAPSSKSTSGGTAALG | |
| | | CLVKDYFPEPVTVSWNSGALTSGVHTFPAVLQSSGLYSLSSVVTVPSSS | |
| | | LGTQTYICNVNHKPSNTKVDKKVEPKSCDKTHTCPPCPAPEAAGPSVFL | |
| | | FPPKPKDTLMISRTPEVTCVVVDVSHEDPEVKFNWYVDGVEVHNAKTKP | |
| | | REEQYNSTYRVVSVLTVLHQDWLNGKEYKCKVSNKALPAPIEKTISKAK | |
| | | GQPREPQVYTLPPSREEMTKNQVSLWCLVKGFYPSDIAVEWESNGQPEN | |
| | | NYKTTPPVLDSDGSFFLYSKLTVDKSRWQQGNVFSCSVMHEALHNHYTQ | |
| | | KSLSLSPGK | |
| | 2^{nd} | QVQLVQSGAEVKKPGASVKVSCKASGYTFTSYVMHWVRQKPGQGLEWIG | 609 |
| | chain | YINPYNEGTESTDKFKGRATMTSDKSTSTVYMELSSLRSEDTAVYYCAS | |
| | | IYYGYEGTYFGVWGQGTLVTVSSASTKGPSVFPLAPSSKSTSGGTAALG | |
| | | CLVKDYFPEPVTVSWNSGALTSGVHTFPAVLQSSGLYSLSSVVTVPSSS | |
| | | LGTQTYICNVNHKPSNTKVDKKVEPKSCGGGGSGGGGSGGGGSGGGGSE | |
| | | VQLVESGGGLVQPGGSLRLSCAASGFTFSTYAMNWVRQAPGKGLEWVGR | |
| | | IRSKYNNYATYYADSVKGRFTISRDDSKNSLYLQMNSLKTEDTAVYYCV | |
| | | RHGNFGNSYVSWFAYWGQGTLVTVSSASVAAPSVFIFPPSDEQLKSGTA | |
| | | SVVCLLNNFYPREAKVQWKVDNALQSGNSQESVTEQDSKDSTYSLSSTL | |
| | | TLSKADYEKHKVYACEVTHQGLSSPVTKSFNRGECDKTHTCPPCPAPEA | |
| | | AGPSVFLFPPKPKDTLMISRTPEVTCVVVDVSHEDPEVKFNWYVDGVEV | |
| | | HNAKTKPREEQYNSTYRVVSVLTVLHQDWLNGKEYKCKVSNKALPAPIE | |
| | | KTISKAKGQPREPQVYTLPPSREEMTKNQVSLSCAVKGFYPSDIAVEWE | |
| | | SNGQPENNYKTTPPVLDSDGSFFLVSKLTVDKSRWQQGNVFSCSVMHEA | |
| | | LHNRFTQKSLSLSPGGGGGSGGGGSGGGGSGGGGSDIQMTQSPSSLSAS | |
| | | VGDRVTITCRASQDISNYLNWYQQKPGKAPKLLIYYTSRLRSGVPSRFS | |
| | | GSGSGTDFTLTISSLQPEDFATYYCQQGHTLPPTFGQGTKVEIKGGGGS | |
| | | GGGGSGGGGSGGGGSEVQLVQSGAEVKKPGASVKVSCKASGYTFTDSYM | |
| | | SWVRQAPGQGLEWIGDMYPDNGDSSYNQKFRERVTITRDTSTSTAYLEL | |
| | | SSLRSEDTAVYYCVLAPRWYFSVWGQGTLVTVSS | |
| | 3^{rd} | EIVLTQSPATLSLSPGERATLSCRASSSVSYMHWYQQKPGQAPRPWIYA | 610 |
| | chain | TSNLASGIPARFSGSRSGTDYTLTISSLEPEDFAVYYCQQWSSNTLTFG | |
| | | GGTKVEIKRTVAAPSVFIFPPSDEQLKSGTASVVCLLNNFYPREAKVQW | |
| | | KVDNALQSGNSQESVTEQDSKDSTYSLSSTLTLSKADYEKHKVYACEVT | |
| | | HQGLSSPVTKSFNRGEC | |
| | 4^{th} | QAVVTQEPSLTVSPGGTVTLTCRSSTGAVTTSNYANWVQQKPGQAPRGL | 611 |
| | chain | IGGTNKRAPWTPARFSGSLLGGKAALTITGAQAEDEADYYCALWYSNLW | |
| | | VFGGGTKLTVLSSASTKGPSVFPLAPSSKSTSGGTAALGCLVKDYFPEP | |
| | | VTVSWNSGALTSGVHTFPAVLQSSGLYSLSSVVTVPSSSLGTQTYICNV | |
| | | NHKPSNTKVDKKVEPKSC | |
| Ly1922 | 1^{st} | QVQLVQSGAEVKKPGASVKVSCKASGYTFTSYVMHWVRQKPGQGLEWIG | 612 |
| | chain | YINPYNEGTESTDKFKGRATMTSDKSTSTVYMELSSLRSEDTAVYYCAS | |
| | | IYYGYEGTYFGVWGQGTLVTVSSASTKGPSVFPLAPSSKSTSGGTAALG | |
| | | CLVKDYFPEPVTVSWNSGALTSGVHTFPAVLQSSGLYSLSSVVTVPSSS | |
| | | LGTQTYICNVNHKPSNTKVDKKVEPKSCDKTHTCPPCPAPEAAGPSVFL | |
| | | FPPKPKDTLMISRTPEVTCVVVDVSHEDPEVKFNWYVDGVEVHNAKTKP | |
| | | REEQYNSTYRVVSVLTVLHQDWLNGKEYKCKVSNKALPAPIEKTISKAK | |
| | | GQPREPQVYTLPPSREEMTKNQVSLWCLVKGFYPSDIAVEWESNGQPEN | |
| | | NYKTTPPVLDSDGSFFLYSKLTVDKSRWQQGNVFSCSVMHEALHNHYTQ | |
| | | KSLSLSPGGGGGSGGGGSGGGGSGGGGSDIQMTQSPSSLSASVGDRVTI | |
| | | TCRASQDISNYLNWYQQKPGKAPKLLIYYTSRLRSGVPSRFSGSGSGTD | |
| | | FTLTISSLQPEDFATYYCQQGHTLPPTFGQGTKVEIKGGGGSGGGGSGG | |
| | | GGSGGGGSEVQLVQSGAEVKKPGASVKVSCKASGYTFTDSYMSWVRQAP | |
| | | GQGLEWIGDMYPDNGDSSYNQKFRERVTITRDTSTSTAYLELSSLRSED | |
| | | TAVYYCVLAPRWYFSVWGQGTLVTVSS | |
| | 2^{nd} | QVQLVQSGAEVKKPGASVKVSCKASGYTFTSYVMHWVRQKPGQGLEWIG | 613 |
| | chain | YINPYNEGTESTDKFKGRATMTSDKSTSTVYMELSSLRSEDTAVYYCAS | |
| | | IYYGYEGTYFGVWGQGTLVTVSSASTKGPSVFPLAPSSKSTSGGTAALG | |
| | | CLVKDYFPEPVTVSWNSGALTSGVHTFPAVLQSSGLYSLSSVVTVPSSS | |
| | | LGTQTYICNVNHKPSNTKVDKKVEPKSCGGGGSGGGGSGGGGSGGGGSE | |
| | | VQLVESGGGLVQPGGSLRLSCAASGFTFSTYAMNWVRQAPGKGLEWVGR | |
| | | IRSKYNNYATYYADSVKGRFTISRDDSKNSLYLQMNSLKTEDTAVYYCV | |
| | | RHGNFGNSYVSWFAYWGQGTLVTVSSASVAAPSVFIFPPSDEQLKSGTA | |
| | | SVVCLLNNFYPREAKVQWKVDNALQSGNSQESVTEQDSKDSTYSLSSTL | |
| | | TLSKADYEKHKVYACEVTHQGLSSPVTKSFNRGECDKTHTCPPCPAPEA | |
| | | AGPSVFLFPPKPKDTLMISRTPEVTCVVVDVSHEDPEVKFNWYVDGVEV | |
| | | HNAKTKPREEQYNSTYRVVSVLTVLHQDWLNGKEYKCKVSNKALPAPIE | |
| | | KTISKAKGQPREPQVYTLPPSREEMTKNQVSLSCAVKGFYPSDIAVEWE | |
| | | SNGQPENNYKTTPPVLDSDGSFFLVSKLTVDKSRWQQGNVFSCSVMHEA | |
| | | LHNRFTQKSLSLSPGK | |
| | 3^{rd} | EIVLTQSPATLSLSPGERATLSCRASSSVSYMHWYQQKPGQAPRPWIYA | 614 |
| | chain | TSNLASGIPARFSGSRSGTDYTLTISSLEPEDFAVYYCQQWSSNTLTFG | |
| | | GGTKVEIKRTVAAPSVFIFPPSDEQLKSGTASVVCLLNNFYPREAKVQW | |
| | | KVDNALQSGNSQESVTEQDSKDSTYSLSSTLTLSKADYEKHKVYACEVT | |
| | | HQGLSSPVTKSFNRGEC | |
| | 4^{th} | QAVVTQEPSLTVSPGGTVTLTCRSSTGAVTTSNYANWVQQKPGQAPRGL | 615 |
| | chain | IGGTNKRAPWTPARFSGSLLGGKAALTITGAQAEDEADYYCALWYSNLW | |
| | | VFGGGTKLTVLSSASTKGPSVFPLAPSSKSTSGGTAALGCLVKDYFPEP | |
| | | VTVSWNSGALTSGVHTFPAVLQSSGLYSLSSVVTVPSSSLGTQTYICNV | |
| | | NHKPSNTKVDKKVEPKSC | |
| Ly1923 | 1^{st} | QVQLVQSGAEVKKPGASVKVSCKASGYTFTSYVMHWVRQKPGQGLEWIG | 616 |
| | chain | YINPYNEGTESTDKFKGRATMTSDKSTSTVYMELSSLRSEDTAVYYCAS | |
| | | IYYGYEGTYFGVWGQGTLVTVSSASTKGPSVFPLAPSSKSTSGGTAALG | |
| | | CLVKDYFPEPVTVSWNSGALTSGVHTFPAVLQSSGLYSLSSVVTVPSSS | |
| | | LGTQTYICNVNHKPSNTKVDKKVEPKSCDKTHTCPPCPAPEAAGPSVFL | |
| | | FPPKPKDTLMISRTPEVTCVVVDVSHEDPEVKFNWYVDGVEVHNAKTKP | |
| | | REEQYNSTYRVVSVLTVLHQDWLNGKEYKCKVSNKALPAPIEKTISKAK | |
| | | GQPREPQVYTLPPSREEMTKNQVSLWCLVKGFYPSDIAVEWESNGQPEN | |
| | | NYKTTPPVLDSDGSFFLYSKLTVDKSRWQQGNVFSCSVMHEALHNHYTQ | |
| | | KSLSLSPGGGGGSGGGGSGGGGSGGGGSEVQLVQSGAEVKKPGASVKVS | |
| | | CKASGYTFTDSYMSWVRQAPGQGLEWIGDMYPDNGDSSYNQKFRERVTI | |
| | | TRDTSTSTAYLELSSLRSEDTAVYYCVLAPRWYFSVWGQGTLVTVSS | |
| | 2^{nd} | QVQLVQSGAEVKKPGASVKVSCKASGYTFTSYVMHWVRQKPGQGLEWIG | 617 |
| | chain | YINPYNEGTESTDKFKGRATMTSDKSTSTVYMELSSLRSEDTAVYYCAS | |
| | | IYYGYEGTYFGVWGQGTLVTVSSASTKGPSVFPLAPSSKSTSGGTAALG | |
| | | CLVKDYFPEPVTVSWNSGALTSGVHTFPAVLQSSGLYSLSSVVTVPSSS | |
| | | LGTQTYICNVNHKPSNTKVDKKVEPKSCGGGGSGGGGSGGGGSGGGGSE | |
| | | VQLVESGGGLVQPGGSLRLSCAASGFTFSTYAMNWVRQAPGKGLEWVGR | |
| | | IRSKYNNYATYYADSVKGRFTISRDDSKNSLYLQMNSLKTEDTAVYYCV | |
| | | RHGNFGNSYVSWFAYWGQGTLVTVSSASVAAPSVFIFPPSDEQLKSGTA | |
| | | SVVCLLNNFYPREAKVQWKVDNALQSGNSQESVTEQDSKDSTYSLSSTL | |
| | | TLSKADYEKHKVYACEVTHQGLSSPVTKSFNRGECDKTHTCPPCPAPEA | |
| | | AGPSVFLFPPKPKDTLMISRTPEVTCVVVDVSHEDPEVKFNWYVDGVEV | |
| | | HNAKTKPREEQYNSTYRVVSVLTVLHQDWLNGKEYKCKVSNKALPAPIE | |
| | | KTISKAKGQPREPQVYTLPPSREEMTKNQVSLSCAVKGFYPSDIAVEWE | |
| | | SNGQPENNYKTTPPVLDSDGSFFLVSKLTVDKSRWQQGNVFSCSVMHEA | |
| | | LHNRFTQKSLSLSPGGGGGSGGGGSGGGGSGGGGSDIQMTQSPSSLSAS | |
| | | VGDRVTITCRASQDISNYLNWYQQKPGKAPKLLIYYTSRLRSGVPSRFS | |
| | | GSGSGTDFTLTISSLQPEDFATYYCQQGHTLPPTFGQGTKVEIK | |
| | 3^{rd} | EIVLTQSPATLSLSPGERATLSCRASSSVSYMHWYQQKPGQAPRPWIYA | 618 |
| | chain | TSNLASGIPARFSGSRSGTDYTLTISSLEPEDFAVYYCQQWSSNTLTFG | |
| | | GGTKVEIKRTVAAPSVFIFPPSDEQLKSGTASVVCLLNNFYPREAKVQW | |
| | | KVDNALQSGNSQESVTEQDSKDSTYSLSSTLTLSKADYEKHKVYACEVT | |
| | | HQGLSSPVTKSFNRGEC | |
| | 4^{th} | QAVVTQEPSLTVSPGGTVTLTCRSSTGAVTTSNYANWVQQKPGQAPRGL | 619 |
| | chain | IGGTNKRAPWTPARFSGSLLGGKAALTITGAQAEDEADYYCALWYSNLW | |
| | | VFGGGTKLTVLSSASTKGPSVFPLAPSSKSTSGGTAALGCLVKDYFPEP | |
| | | VTVSWNSGALTSGVHTFPAVLQSSGLYSLSSVVTVPSSSLGTQTYICNV | |
| | | NHKPSNTKVDKKVEPKSC | |
| Ly1924 | 1^{st} | QVQLVQSGAEVKKPGASVKVSCKASGYTFTSYVMHWVRQKPGQGLEWIG | 620 |
| | chain | YINPYNEGTESTDKFKGRATMTSDKSTSTVYMELSSLRSEDTAVYYCAS | |
| | | IYYGYEGTYFGVWGQGTLVTVSSASTKGPSVFPLAPSSKSTSGGTAALG | |
| | | CLVKDYFPEPVTVSWNSGALTSGVHTFPAVLQSSGLYSLSSVVTVPSSS | |
| | | LGTQTYICNVNHKPSNTKVDKKVEPKSCDKTHTCPPCPAPEAAGPSVFL | |
| | | FPPKPKDTLMISRTPEVTCVVVDVSHEDPEVKFNWYVDGVEVHNAKTKP | |
| | | REEQYNSTYRVVSVLTVLHQDWLNGKEYKCKVSNKALPAPIEKTISKAK | |
| | | GQPREPQVYTLPPSREEMTKNQVSLWCLVKGFYPSDIAVEWESNGQPEN | |
| | | NYKTTPPVLDSDGSFFLYSKLTVDKSRWQQGNVFSCSVMHEALHNHYTQ | |
| | | KSLSLSPGGGGGSGGGGSGGGGSGGGGSEIVLTQSPATLSLSPGERATL | |
| | | SCRASKSVRTGMHWYQQKPGQAPRLLIYGASNLESGIPARFSGSGSGTD | |
| | | FTLTISSLEPEDFAVYYCQQSWNHFTFGQGTKLEIKGGGGSGGGGSGGG | |
| | | GSGGGGSQVQLQESGPGLVKPSETLSLTCTVSGFSLTSYNVHWIRQPPG | |
| | | KGLEWIGVIWSGVRTDYNSVLKPRVTISVDTSKNQFSLKLSSVTAADTA | |
| | | VYYCARGTYDDNYHDVMDAWGQGTLVTVSS | |
| | 2^{nd} | QVQLVQSGAEVKKPGASVKVSCKASGYTFTSYVMHWVRQKPGQGLEWIG | 621 |
| | chain | YINPYNEGTESTDKFKGRATMTSDKSTSTVYMELSSLRSEDTAVYYCAS | |
| | | IYYGYEGTYFGVWGQGTLVTVSSASTKGPSVFPLAPSSKSTSGGTAALG | |
| | | CLVKDYFPEPVTVSWNSGALTSGVHTFPAVLQSSGLYSLSSVVTVPSSS | |
| | | LGTQTYICNVNHKPSNTKVDKKVEPKSCGGGGSGGGGSGGGGSGGGGSQ | |
| | | AVVTQEPSLTVSPGGTVTLTCRSSTGAVTTSNYANWVQQKPGQAPRGLI | |
| | | GGTNKRAPWTPARFSGSLLGGKAALTITGAQAEDEADYYCALWYSNLWV | |
| | | FGGGTKLTVLGGGGSGGGGSGGGGSGGGGSEVQLVESGGGLVQPGGSLR | |
| | | LSCAASGFTFSTYAMNWVRQAPGKGLEWVGRIRSKYNNYATYYADSVKG | |
| | | RFTISRDDSKNSLYLQMNSLKTEDTAVYYCVRHGNFGNSYVSWFAYWGQ | |
| | | GTLVTVSSDKTHTCPPCPAPEAAGPSVFLFPPKPKDTLMISRTPEVTCV | |
| | | VVDVSHEDPEVKFNWYVDGVEVHNAKTKPREEQYNSTYRVVSVLTVLHQ | |
| | | DWLNGKEYKCKVSNKALPAPIEKTISKAKGQPREPQVYTLPPSREEMTK | |
| | | NQVSLSCAVKGFYPSDIAVEWESNGQPENNYKTTPPVLDSDGSFFLVSK | |
| | | LTVDKSRWQQGNVFSCSVMHEALHNRFTQKSLSLSPGK | |
| | 3^{rd} | EIVLTQSPATLSLSPGERATLSCRASSSVSYMHWYQQKPGQAPRPWIYA | 622 |
| | chain | TSNLASGIPARFSGSRSGTDYTLTISSLEPEDFAVYYCQQWSSNTLTFG | |
| | | GGTKVEIKRTVAAPSVFIFPPSDEQLKSGTASVVCLLNNFYPREAKVQW | |
| | | KVDNALQSGNSQESVTEQDSKDSTYSLSSTLTLSKADYEKHKVYACEVT | |
| | | HQGLSSPVTKSFNRGEC | |
| Ly1925 | 1^{st} | QVQLVQSGAEVKKPGASVKVSCKASGYTFTSYVMHWVRQKPGQGLEWIG | 623 |
| | chain | YINPYNEGTESTDKFKGRATMTSDKSTSTVYMELSSLRSEDTAVYYCAS | |
| | | IYYGYEGTYFGVWGQGTLVTVSSASTKGPSVFPLAPSSKSTSGGTAALG | |
| | | CLVKDYFPEPVTVSWNSGALTSGVHTFPAVLQSSGLYSLSSVVTVPSSS | |
| | | LGTQTYICNVNHKPSNTKVDKKVEPKSCDKTHTCPPCPAPEAAGPSVFL | |
| | | FPPKPKDTLMISRTPEVTCVVVDVSHEDPEVKFNWYVDGVEVHNAKTKP | |
| | | REEQYNSTYRVVSVLTVLHQDWLNGKEYKCKVSNKALPAPIEKTISKAK | |
| | | GQPREPQVYTLPPSREEMTKNQVSLWCLVKGFYPSDIAVEWESNGQPEN | |
| | | NYKTTPPVLDSDGSFFLYSKLTVDKSRWQQGNVFSCSVMHEALHNHYTQ | |
| | | KSLSLSPGGGGGSGGGGSGGGGSGGGGSDIQMTQSPSSLSASVGDRVTI | |
| | | TCRASQDISNYLNWYQQKPGKAPKLLIYYTSRLRSGVPSRFSGSGSGTD | |
| | | FTLTISSLQPEDFATYYCQQGHTLPPTFGQGTKVEIKGGGGSGGGGSGG | |
| | | GGSGGGGSEVQLVQSGAEVKKPGASVKVSCKASGYTFTDSYMSWVRQAP | |
| | | GQGLEWIGDMYPDNGDSSYNQKFRERVTITRDTSTSTAYLELSSLRSED | |
| | | TAVYYCVLAPRWYFSVWGQGTLVTVSS | |
| | 2^{nd} | QVQLVQSGAEVKKPGASVKVSCKASGYTFTSYVMHWVRQKPGQGLEWIG | 624 |
| | chain | YINPYNEGTESTDKFKGRATMTSDKSTSTVYMELSSLRSEDTAVYYCAS | |
| | | IYYGYEGTYFGVWGQGTLVTVSSASTKGPSVFPLAPSSKSTSGGTAALG | |
| | | CLVKDYFPEPVTVSWNSGALTSGVHTFPAVLQSSGLYSLSSVVTVPSSS | |
| | | LGTQTYICNVNHKPSNTKVDKKVEPKSCGGGGSGGGGSGGGGSGGGGSQ | |
| | | AVVTQEPSLTVSPGGTVTLTCRSSTGAVTTSNYANWVQQKPGQAPRGLI | |
| | | GGTNKRAPWTPARFSGSLLGGKAALTITGAQAEDEADYYCALWYSNLWV | |
| | | FGGGTKLTVLGGGGSGGGGSGGGGSGGGGSEVQLVESGGGLVQPGGSLR | |
| | | LSCAASGFTFSTYAMNWVRQAPGKGLEWVGRIRSKYNNYATYYADSVKG | |
| | | RFTISRDDSKNSLYLQMNSLKTEDTAVYYCVRHGNFGNSYVSWFAYWGQ | |
| | | GTLVTVSSDKTHTCPPCPAPEAAGPSVFLFPPKPKDTLMISRTPEVTCV | |
| | | VVDVSHEDPEVKFNWYVDGVEVHNAKTKPREEQYNSTYRVVSVLTVLHQ | |
| | | DWLNGKEYKCKVSNKALPAPIEKTISKAKGQPREPQVYTLPPSREEMTK | |
| | | NQVSLSCAVKGFYPSDIAVEWESNGQPENNYKTTPPVLDSDGSFFLVSK | |
| | | LTVDKSRWQQGNVFSCSVMHEALHNRFTQKSLSLSPGGGGGSGGGGSGG | |
| | | GGSGGGGSDIQMTQSPSSLSASVGDRVTITCRASQDISNYLNWYQQKPG | |
| | | KAPKLLIYYTSRLRSGVPSRFSGSGSGTDFTLTISSLQPEDFATYYCQQ | |
| | | GHTLPPTFGQGTKVEIKGGGGSGGGGSGGGGSGGGGSEVQLVQSGAEVK | |
| | | KPGASVKVSCKASGYTFTDSYMSWVRQAPGQGLEWIGDMYPDNGDSSYN | |
| | | QKFRERVTITRDTSTSTAYLELSSLRSEDTAVYYCVLAPRWYFSVWGQG | |
| | | TLVTVSS | |
| | 3^{rd} | EIVLTQSPATLSLSPGERATLSCRASSSVSYMHWYQQKPGQAPRPWIYA | 625 |
| | chain | TSNLASGIPARFSGSRSGTDYTLTISSLEPEDFAVYYCQQWSSNTLTFG | |
| | | GGTKVEIKRTVAAPSVFIFPPSDEQLKSGTASVVCLLNNFYPREAKVQW | |
| | | KVDNALQSGNSQESVTEQDSKDSTYSLSSTLTLSKADYEKHKVYACEVT | |
| | | HQGLSSPVTKSFNRGEC | |
| Ly1926 | 1^{st} | QVQLVQSGAEVKKPGASVKVSCKASGYTFTSYVMHWVRQKPGQGLEWIG | 626 |
| | chain | YINPYNEGTESTDKFKGRATMTSDKSTSTVYMELSSLRSEDTAVYYCAS | |
| | | IYYGYEGTYFGVWGQGTLVTVSSASTKGPSVFPLAPSSKSTSGGTAALG | |
| | | CLVKDYFPEPVTVSWNSGALTSGVHTFPAVLQSSGLYSLSSVVTVPSSS | |
| | | LGTQTYICNVNHKPSNTKVDKKVEPKSCDKTHTCPPCPAPEAAGPSVFL | |
| | | FPPKPKDTLMISRTPEVTCVVVDVSHEDPEVKFNWYVDGVEVHNAKTKP | |
| | | REEQYNSTYRVVSVLTVLHQDWLNGKEYKCKVSNKALPAPIEKTISKAK | |
| | | GQPREPQVYTLPPSREEMTKNQVSLWCLVKGFYPSDIAVEWESNGQPEN | |
| | | NYKTTPPVLDSDGSFFLYSKLTVDKSRWQQGNVFSCSVMHEALHNHYTQ | |
| | | KSLSLSPGK | |
| | 2^{nd} | QVQLVQSGAEVKKPGASVKVSCKASGYTFTSYVMHWVRQKPGQGLEWIG | 627 |
| | chain | YINPYNEGTESTDKFKGRATMTSDKSTSTVYMELSSLRSEDTAVYYCAS | |
| | | IYYGYEGTYFGVWGQGTLVTVSSASTKGPSVFPLAPSSKSTSGGTAALG | |
| | | CLVKDYFPEPVTVSWNSGALTSGVHTFPAVLQSSGLYSLSSVVTVPSSS | |
| | | LGTQTYICNVNHKPSNTKVDKKVEPKSCGGGGSGGGGSGGGGSGGGGSQ | |
| | | AVVTQEPSLTVSPGGTVTLTCRSSTGAVTTSNYANWVQQKPGQAPRGLI | |
| | | GGTNKRAPWTPARFSGSLLGGKAALTITGAQAEDEADYYCALWYSNLWV | |
| | | FGGGTKLTVLGGGGSGGGGSGGGGSGGGGSEVQLVESGGGLVQPGGSLR | |
| | | LSCAASGFTFSTYAMNWVRQAPGKGLEWVGRIRSKYNNYATYYADSVKG | |
| | | RFTISRDDSKNSLYLQMNSLKTEDTAVYYCVRHGNFGNSYVSWFAYWGQ | |
| | | GTLVTVSSDKTHTCPPCPAPEAAGPSVFLFPPKPKDTLMISRTPEVTCV | |
| | | VVDVSHEDPEVKFNWYVDGVEVHNAKTKPREEQYNSTYRVVSVLTVLHQ | |
| | | DWLNGKEYKCKVSNKALPAPIEKTISKAKGQPREPQVYTLPPSREEMTK | |
| | | NQVSLSCAVKGFYPSDIAVEWESNGQPENNYKTTPPVLDSDGSFFLVSK | |
| | | LTVDKSRWQQGNVFSCSVMHEALHNRFTQKSLSLSPGGGGGSGGGGSGG | |
| | | GGSGGGGSEIVLTQSPATLSLSPGERATLSCRASKSVRTGMHWYQQKPG | |
| | | QAPRLLIYGASNLESGIPARFSGSGSGTDFTLTISSLEPEDFAVYYCQQ | |
| | | SWNHFTFGQGTKLEIKGGGGSGGGGSGGGGSGGGGSQVQLQESGPGLVK | |
| | | PSETLSLTCTVSGFSLTSYNVHWIRQPPGKGLEWIGVIWSGVRTDYNSV | |
| | | LKPRVTISVDTSKNQFSLKLSSVTAADTAVYYCARGTYDDNYHDVMDAW | |
| | | GQGTLVTVSS | |
| | 3^{rd} | EIVLTQSPATLSLSPGERATLSCRASSSVSYMHWYQQKPGQAPRPWIYA | 628 |
| | chain | TSNLASGIPARFSGSRSGTDYTLTISSLEPEDFAVYYCQQWSSNTLTFG | |
| | | GGTKVEIKRTVAAPSVFIFPPSDEQLKSGTASVVCLLNNFYPREAKVQW | |
| | | KVDNALQSGNSQESVTEQDSKDSTYSLSSTLTLSKADYEKHKVYACEVT | |
| | | HQGLSSPVTKSFNRGEC | |
| Ly1927 | 1^{st} | QVQLVQSGAEVKKPGASVKVSCKASGYTFTSYVMHWVRQKPGQGLEWIG | 629 |
| | chain | YINPYNEGTESTDKFKGRATMTSDKSTSTVYMELSSLRSEDTAVYYCAS | |
| | | IYYGYEGTYFGVWGQGTLVTVSSASTKGPSVFPLAPSSKSTSGGTAALG | |
| | | CLVKDYFPEPVTVSWNSGALTSGVHTFPAVLQSSGLYSLSSVVTVPSSS | |
| | | LGTQTYICNVNHKPSNTKVDKKVEPKSCGGGGSGGGGSGGGGSGGGGSE | |
| | | VQLVESGGGLVQPGGSLRLSCAASGFTFSTYAMNWVRQAPGKGLEWVGR | |
| | | IRSKYNNYATYYADSVKGRFTISRDDSKNSLYLQMNSLKTEDTAVYYCV | |
| | | RHGNFGNSYVSWFAYWGQGTLVTVSSPAPEAAGPSVFLFPPKPKDTLMI | |
| | | SRTPEVTCVVVDVSHEDPEVKFNWYVDGVEVHNAKTKPREEQYNSTYRV | |
| | | VSVLTVLHQDWLNGKEYKCKVSNKALPAPIEKTISKAKGQPREPQVYTL | |
| | | PPSREEMTKNQVSLWCLVKGFYPSDIAVEWESNGQPENNYKTTPPVLDS | |
| | | DGSFFLYSKLTVDKSRWQQGNVFSCSVMHEALHNHYTQKSLSLSPGGGG | |
| | | GSGGGGSGGGGSGGGGSDIQMTQSPSSLSASVGDRVTITCRASQDISNY | |
| | | LNWYQQKPGKAPKLLIYYTSRLRSGVPSRFSGSGSGTDFTLTISSLQPE | |
| | | DFATYYCQQGHTLPPTFGQGTKVEIKGGGGSGGGGSGGGGSGGGGSEVQ | |
| | | LVQSGAEVKKPGASVKVSCKASGYTFTDSYMSWVRQAPGQGLEWIGDMY | |
| | | PDNGDSSYNQKFRERVTITRDTSTSTAYLELSSLRSEDTAVYYCVLAPR | |
| | | WYFSVWGQGTLVTVSS | |
| | 2^{nd} | QVQLVQSGAEVKKPGASVKVSCKASGYTFTSYVMHWVRQKPGQGLEWIG | 630 |
| | chain | YINPYNEGTESTDKFKGRATMTSDKSTSTVYMELSSLRSEDTAVYYCAS | |
| | | IYYGYEGTYFGVWGQGTLVTVSSASTKGPSVFPLAPSSKSTSGGTAALG | |
| | | CLVKDYFPEPVTVSWNSGALTSGVHTFPAVLQSSGLYSLSSVVTVPSSS | |
| | | LGTQTYICNVNHKPSNTKVDKKVEPKSCGGGGSGGGGSGGGGSGGGGSQ | |
| | | AVVTQEPSLTVSPGGTVTLTCRSSTGAVTTSNYANWVQQKPGQAPRGLI | |
| | | GGTNKRAPWTPARFSGSLLGGKAALTITGAQAEDEADYYCALWYSNLWV | |
| | | FGGGTKLTVLPAPEAAGPSVFLFPPKPKDTLMISRTPEVTCVVVDVSHE | |
| | | DPEVKFNWYVDGVEVHNAKTKPREEQYNSTYRVVSVLIVLHQDWLNGKE | |
| | | YKCKVSNKALPAPIEKTISKAKGQPREPQVYTLPPSREEMTKNQVSLSC | |
| | | AVKGFYPSDIAVEWESNGQPENNYKTTPPVLDSDGSFFLVSKLTVDKSR | |
| | | WQQGNVFSCSVMHEALHNRFTQKSLSLSPGGGGGSGGGGSGGGGSGGGG | |
| | | SDIQMTQSPSSLSASVGDRVTITCRASQDISNYLNWYQQKPGKAPKLLI | |
| | | YYTSRLRSGVPSRFSGSGSGTDFTLTISSLQPEDFATYYCQQGHTLPPT | |
| | | FGQGTKVEIKGGGGSGGGGSGGGGSGGGGSEVQLVQSGAEVKKPGASVK | |
| | | VSCKASGYTFTDSYMSWVRQAPGQGLEWIGDMYPDNGDSSYNQKFRERV | |
| | | TITRDTSTSTAYLELSSLRSEDTAVYYCVLAPRWYFSVWGQGTLVTVSS | |
| | 3^{rd} | EIVLTQSPATLSLSPGERATLSCRASSSVSYMHWYQQKPGQAPRPWIYA | 631 |
| | chain | TSNLASGIPARFSGSRSGTDYTLTISSLEPEDFAVYYCQQWSSNTLTFG | |
| | | GGTKVEIKRTVAAPSVFIFPPSDEQLKSGTASVVCLLNNFYPREAKVQW | |
| | | KVDNALQSGNSQESVTEQDSKDSTYSLSSTLTLSKADYEKHKVYACEVT | |
| | | HQGLSSPVTKSFNRGEC | |
| Ly1928 | 1^{st} | QVQLVQSGAEVKKPGASVKVSCKASGYTFTSYVMHWVRQKPGQGLEWIG | 632 |
| | chain | YINPYNEGTESTDKFKGRATMTSDKSTSTVYMELSSLRSEDTAVYYCAS | |
| | | IYYGYEGTYFGVWGQGTLVTVSSASTKGPSVFPLAPSSKSTSGGTAALG | |
| | | CLVKDYFPEPVTVSWNSGALTSGVHTFPAVLQSSGLYSLSSVVTVPSSS | |
| | | LGTQTYICNVNHKPSNTKVDKKVEPKSCGGGGSGGGGSGGGGSGGGGSE | |
| | | VQLVESGGGLVQPGGSLRLSCAASGFTFSTYAMNWVRQAPGKGLEWVGR | |
| | | IRSKYNNYATYYADSVKGRFTISRDDSKNSLYLQMNSLKTEDTAVYYCV | |
| | | RHGNFGNSYVSWFAYWGQGTLVTVSSPAPEAAGPSVFLFPPKPKDTLMI | |
| | | SRTPEVTCVVVDVSHEDPEVKFNWYVDGVEVHNAKTKPREEQYNSTYRV | |
| | | VSVLTVLHQDWLNGKEYKCKVSNKALPAPIEKTISKAKGQPREPQVYTL | |
| | | PPSREEMTKNQVSLWCLVKGFYPSDIAVEWESNGQPENNYKTTPPVLDS | |
| | | DGSFFLYSKLTVDKSRWQQGNVFSCSVMHEALHNHYTQKSLSLSPGGGG | |
| | | GSGGGGSGGGGSGGGGSDIQMTQSPSSLSASVGDRVTITCRASQDISNY | |
| | | LNWYQQKPGKAPKLLIYYTSRLRSGVPSRFSGSGSGTDFTLTISSLQPE | |
| | | DFATYYCQQGHTLPPTFGQGTKVEIKGGGGSGGGGSGGGGSGGGGSEVQ | |
| | | LVQSGAEVKKPGASVKVSCKASGYTFTDSYMSWVRQAPGQGLEWIGDMY | |
| | | PDNGDSSYNQKFRERVTITRDTSTSTAYLELSSLRSEDTAVYYCVLAPR | |
| | | WYFSVWGQGTLVTVSS | |
| | 2^{nd} | QVQLVQSGAEVKKPGASVKVSCKASGYTFTSYVMHWVRQKPGQGLEWIG | 633 |
| | chain | YINPYNEGTESTDKFKGRATMTSDKSTSTVYMELSSLRSEDTAVYYCAS | |
| | | IYYGYEGTYFGVWGQGTLVTVSSASTKGPSVFPLAPSSKSTSGGTAALG | |
| | | CLVKDYFPEPVTVSWNSGALTSGVHTFPAVLQSSGLYSLSSVVTVPSSS | |
| | | LGTQTYICNVNHKPSNTKVDKKVEPKSCGGGGSGGGGSGGGGSGGGGSQ | |
| | | AVVTQEPSLTVSPGGTVTLTCRSSTGAVTTSNYANWVQQKPGQAPRGLI | |
| | | GGTNKRAPWTPARFSGSLLGGKAALTITGAQAEDEADYYCALWYSNLWV | |
| | | FGGGTKLTVLPAPEAAGPSVFLFPPKPKDTLMISRTPEVTCVVVDVSHE | |
| | | DPEVKFNWYVDGVEVHNAKTKPREEQYNSTYRVVSVLTVLHQDWLNGKE | |
| | | YKCKVSNKALPAPIEKTISKAKGQPREPQVYTLPPSREEMTKNQVSLSC | |
| | | AVKGFYPSDIAVEWESNGQPENNYKTTPPVLDSDGSFFLVSKLTVDKSR | |
| | | WQQGNVFSCSVMHEALHNRFTQKSLSLSPGK | |
| | 3rd | EIVLTQSPATLSLSPGERATLSCRASSSVSYMHWYQQKPGQAPRPWIYA | 634 |
| | chain | TSNLASGIPARFSGSRSGTDYTLTISSLEPEDFAVYYCQQWSSNTLTFG | |
| | | GGTKVEIKRTVAAPSVFIFPPSDEQLKSGTASVVCLLNNFYPREAKVQW | |
| | | KVDNALQSGNSQESVTEQDSKDSTYSLSSTLTLSKADYEKHKVYACEVT | |
| | | HQGLSSPVTKSFNRGEC | |
| Ly1929 | 1^{st} | QVQLVQSGAEVKKPGASVKVSCKASGYTFTSYVMHWVRQKPGQGLEWIG | 635 |
| | chain | YINPYNEGTESTDKFKGRATMTSDKSTSTVYMELSSLRSEDTAVYYCAS | |
| | | IYYGYEGTYFGVWGQGTLVTVSSASTKGPSVFPLAPSSKSTSGGTAALG | |
| | | CLVKDYFPEPVTVSWNSGALTSGVHTFPAVLQSSGLYSLSSVVTVPSSS | |
| | | LGTQTYICNVNHKPSNTKVDKKVEPKSCGGGGSGGGGSGGGGSGGGGSE | |
| | | VQLVESGGGLVQPGGSLRLSCAASGFTFSTYAMNWVRQAPGKGLEWVGR | |
| | | IRSKYNNYATYYADSVKGRFTISRDDSKNSLYLQMNSLKTEDTAVYYCV | |
| | | RHGNFGNSYVSWFAYWGQGTLVTVSSPAPEAAGPSVFLFPPKPKDTLMI | |
| | | SRTPEVTCVVVDVSHEDPEVKFNWYVDGVEVHNAKTKPREEQYNSTYRV | |
| | | VSVLTVLHQDWLNGKEYKCKVSNKALPAPIEKTISKAKGQPREPQVYTL | |
| | | PPSREEMTKNQVSLWCLVKGFYPSDIAVEWESNGQPENNYKTTPPVLDS | |
| | | DGSFFLYSKLTVDKSRWQQGNVFSCSVMHEALHNHYTQKSLSLSPGK | |
| | 2^{nd} | QVQLVQSGAEVKKPGASVKVSCKASGYTFTSYVMHWVRQKPGQGLEWIG | 636 |
| | chain | YINPYNEGTESTDKFKGRATMTSDKSTSTVYMELSSLRSEDTAVYYCAS | |
| | | IYYGYEGTYFGVWGQGTLVTVSSASTKGPSVFPLAPSSKSTSGGTAALG | |
| | | CLVKDYFPEPVTVSWNSGALTSGVHTFPAVLQSSGLYSLSSVVTVPSSS | |
| | | LGTQTYICNVNHKPSNTKVDKKVEPKSCGGGGSGGGGSGGGGSGGGGSQ | |
| | | AVVTQEPSLTVSPGGTVTLTCRSSTGAVTTSNYANWVQQKPGQAPRGLI | |
| | | GGTNKRAPWTPARFSGSLLGGKAALTITGAQAEDEADYYCALWYSNLWV | |
| | | FGGGTKLTVLPAPEAAGPSVFLFPPKPKDTLMISRTPEVTCVVVDVSHE | |
| | | DPEVKFNWYVDGVEVHNAKTKPREEQYNSTYRVVSVLTVLHQDWLNGKE | |
| | | YKCKVSNKALPAPIEKTISKAKGQPREPQVYTLPPSREEMTKNQVSLSC | |
| | | AVKGFYPSDIAVEWESNGQPENNYKTTPPVLDSDGSFFLVSKLTVDKSR | |
| | | WQQGNVFSCSVMHEALHNRFTQKSLSLSPGGGGGSGGGGSGGGGSGGGG | |
| | | SDIQMTQSPSSLSASVGDRVTITCRASQDISNYLNWYQQKPGKAPKLLI | |
| | | YYTSRLRSGVPSRFSGSGSGTDFTLTISSLQPEDFATYYCQQGHTLPPT | |
| | | FGQGTKVEIKGGGGSGGGGSGGGGSGGGGSEVQLVQSGAEVKKPGASVK | |
| | | VSCKASGYTFTDSYMSWVRQAPGQGLEWIGDMYPDNGDSSYNQKFRERV | |
| | | TITRDTSTSTAYLELSSLRSEDTAVYYCVLAPRWYFSVWGQGTLVTVSS | |
| | 3^{rd} | EIVLTQSPATLSLSPGERATLSCRASSSVSYMHWYQQKPGQAPRPWIYA | 637 |
| | chain | TSNLASGIPARFSGSRSGTDYTLTISSLEPEDFAVYYCQQWSSNTLTFG | |
| | | GGTKVEIKRTVAAPSVFIFPPSDEQLKSGTASVVCLLNNFYPREAKVQW | |
| | | KVDNALQSGNSQESVTEQDSKDSTYSLSSTLTLSKADYEKHKVYACEVT | |
| | | HQGLSSPVTKSFNRGEC | |
| Ly1930 | 1^{st} | QVQLVQSGAEVKKPGASVKVSCKASGYTFTSYVMHWVRQKPGQGLEWIG | 638 |
| | chain | YINPYNEGTESTDKFKGRATMTSDKSTSTVYMELSSLRSEDTAVYYCAS | |
| | | IYYGYEGTYFGVWGQGTLVTVSSASTKGPSVFPLAPSSKSTSGGTAALG | |
| | | CLVKDYFPEPVTVSWNSGALTSGVHTFPAVLQSSGLYSLSSVVTVPSSS | |
| | | LGTQTYICNVNHKPSNTKVDKKVEPKSCGGGGSGGGGSGGGGSGGGGSE | |
| | | VQLVESGGGLVQPGGSLRLSCAASGFTFSTYAMNWVRQAPGKGLEWVGR | |
| | | IRSKYNNYATYYADSVKGRFTISRDDSKNSLYLQMNSLKTEDTAVYYCV | |
| | | RHGNFGNSYVSWFAYWGQGTLVTVSSPAPEAAGPSVFLFPPKPKDTLMI | |
| | | SRTPEVTCVVVDVSHEDPEVKFNWYVDGVEVHNAKTKPREEQYNSTYRV | |
| | | VSVLTVLHQDWLNGKEYKCKVSNKALPAPIEKTISKAKGQPREPQVYTL | |
| | | PPSREEMTKNQVSLWCLVKGFYPSDIAVEWESNGQPENNYKTTPPVLDS | |
| | | DGSFFLYSKLTVDKSRWQQGNVFSCSVMHEALHNHYTQKSLSLSPGGGG | |
| | | GSGGGGSGGGGSGGGGSEVQLVQSGAEVKKPGASVKVSCKASGYTFTDS | |
| | | YMSWVRQAPGQGLEWIGDMYPDNGDSSYNQKFRERVTITRDTSTSTAYL | |
| | | ELSSLRSEDTAVYYCVLAPRWYFSVWGQGTLVTVSS | |
| | 2^{nd} | QVQLVQSGAEVKKPGASVKVSCKASGYTFTSYVMHWVRQKPGQGLEWIG | 639 |
| | chain | YINPYNEGTESTDKFKGRATMTSDKSTSTVYMELSSLRSEDTAVYYCAS | |
| | | IYYGYEGTYFGVWGQGTLVTVSSASTKGPSVFPLAPSSKSTSGGTAALG | |
| | | CLVKDYFPEPVTVSWNSGALTSGVHTFPAVLQSSGLYSLSSVVTVPSSS | |
| | | LGTQTYICNVNHKPSNTKVDKKVEPKSCGGGGSGGGGSGGGGSGGGGSQ | |
| | | AVVTQEPSLTVSPGGTVTLTCRSSTGAVTTSNYANWVQQKPGQAPRGLI | |
| | | GGTNKRAPWTPARFSGSLLGGKAALTITGAQAEDEADYYCALWYSNLWV | |
| | | FGGGTKLTVLPAPEAAGPSVFLFPPKPKDTLMISRTPEVTCVVVDVSHE | |
| | | DPEVKFNWYVDGVEVHNAKTKPREEQYNSTYRVVSVLTVLHQDWLNGKE | |
| | | YKCKVSNKALPAPIEKTISKAKGQPREPQVYTLPPSREEMTKNQVSLSC | |
| | | AVKGFYPSDIAVEWESNGQPENNYKTTPPVLDSDGSFFLVSKLTVDKSR | |
| | | WQQGNVFSCSVMHEALHNRFTQKSLSLSPGGGGGSGGGGSGGGGSGGGG | |
| | | SDIQMTQSPSSLSASVGDRVTITCRASQDISNYLNWYQQKPGKAPKLLI | |
| | | YYTSRLRSGVPSRFSGSGSGTDFTLTISSLQPEDFATYYCQQGHTLPPT | |
| | | FGQGTKVEIK | |
| | 3^{rd} | EIVLTQSPATLSLSPGERATLSCRASSSVSYMHWYQQKPGQAPRPWIYA | 640 |
| | chain | TSNLASGIPARFSGSRSGTDYTLTISSLEPEDFAVYYCQQWSSNTLTFG | |
| | | GGTKVEIKRTVAAPSVFIFPPSDEQLKSGTASVVCLLNNFYPREAKVQW | |
| | | KVDNALQSGNSQESVTEQDSKDSTYSLSSTLTLSKADYEKHKVYACEVT | |
| | | HQGLSSPVTKSFNRGEC | |
| Ly1931 | 1^{st} | QVQLVQSGAEVKKPGASVKVSCKASGYTFTSYVMHWVRQKPGQGLEWIG | 641 |
| | chain | YINPYNEGTESTDKFKGRATMTSDKSTSTVYMELSSLRSEDTAVYYCAS | |
| | | IYYGYEGTYFGVWGQGTLVTVSSASTKGPSVFPLAPSSKSTSGGTAALG | |
| | | CLVKDYFPEPVTVSWNSGALTSGVHTFPAVLQSSGLYSLSSVVTVPSSS | |
| | | LGTQTYICNVNHKPSNTKVDKKVEPKSCGGGGSGGGGSGGGGSGGGGSE | |
| | | VQLVESGGGLVQPGGSLRLSCAASGFTFSTYAMNWVRQAPGKGLEWVGR | |
| | | IRSKYNNYATYYADSVKGRFTISRDDSKNSLYLQMNSLKTEDTAVYYCV | |
| | | RHGNFGNSYVSWFAYWGQGTLVTVSSPAPEAAGPSVFLFPPKPKDTLMI | |
| | | SRTPEVTCVVVDVSHEDPEVKFNWYVDGVEVHNAKTKPREEQYNSTYRV | |
| | | VSVLTVLHQDWLNGKEYKCKVSNKALPAPIEKTISKAKGQPREPQVYTL | |
| | | PPSREEMTKNQVSLWCLVKGFYPSDIAVEWESNGQPENNYKTTPPVLDS | |
| | | DGSFFLYSKLTVDKSRWQQGNVFSCSVMHEALHNHYTQKSLSLSPGK | |
| | 2^{nd} | QVQLVQSGAEVKKPGASVKVSCKASGYTFTSYVMHWVRQKPGQGLEWIG | 642 |
| | chain | YINPYNEGTESTDKFKGRATMTSDKSTSTVYMELSSLRSEDTAVYYCAS | |
| | | IYYGYEGTYFGVWGQGTLVTVSSASTKGPSVFPLAPSSKSTSGGTAALG | |
| | | CLVKDYFPEPVTVSWNSGALTSGVHTFPAVLQSSGLYSLSSVVTVPSSS | |
| | | LGTQTYICNVNHKPSNTKVDKKVEPKSCGGGGSGGGGSGGGGSGGGGSQ | |
| | | AVVTQEPSLTVSPGGTVTLTCRSSTGAVTTSNYANWVQQKPGQAPRGLI | |
| | | GGTNKRAPWTPARFSGSLLGGKAALTITGAQAEDEADYYCALWYSNLWV | |
| | | FGGGTKLTVLPAPEAAGPSVFLFPPKPKDTLMISRTPEVTCVVVDVSHE | |
| | | DPEVKFNWYVDGVEVHNAKTKPREEQYNSTYRVVSVLTVLHQDWLNGKE | |
| | | YKCKVSNKALPAPIEKTISKAKGQPREPQVYTLPPSREEMTKNQVSLSC | |
| | | AVKGFYPSDIAVEWESNGQPENNYKTTPPVLDSDGSFFLVSKLTVDKSR | |
| | | WQQGNVFSCSVMHEALHNRFTQKSLSLSPGK | |
| | 3^{rd} | EIVLTQSPATLSLSPGERATLSCRASSSVSYMHWYQQKPGQAPRPWIYA | 643 |
| | chain | TSNLASGIPARFSGSRSGTDYTLTISSLEPEDFAVYYCQQWSSNTLTFG | |
| | | GGTKVEIKRTVAAPSVFIFPPSDEQLKSGTASVVCLLNNFYPREAKVQW | |
| | | KVDNALQSGNSQESVTEQDSKDSTYSLSSTLTLSKADYEKHKVYACEVT | |
| | | HQGLSSPVTKSFNRGECGGGGSGGGGSGGGGSGGGGSDIQMTQSPSSLS | |
| | | ASVGDRVTITCRASQDISNYLNWYQQKPGKAPKLLIYYTSRLRSGVPSR | |
| | | FSGSGSGTDFTLTISSLQPEDFATYYCQQGHTLPPTFGQGTKVEIKGGG | |
| | | GSGGGGSGGGGSGGGGSEVQLVQSGAEVKKPGASVKVSCKASGYTFTDS | |
| | | YMSWVRQAPGQGLEWIGDMYPDNGDSSYNQKFRERVTITRDTSTSTAYL | |
| | | ELSSLRSEDTAVYYCVLAPRWYFSVWGQGTLVTVSS | |
| Ly1932 | 1^{st} | QVQLVQSGAEVKKPGASVKVSCKASGYTFTSYVMHWVRQKPGQGLEWIG | 644 |
| | chain | YINPYNEGTESTDKFKGRATMTSDKSTSTVYMELSSLRSEDTAVYYCAS | |
| | | IYYGYEGTYFGVWGQGTLVTVSSASTKGPSVFPLAPSSKSTSGGTAALG | |
| | | CLVKDYFPEPVTVSWNSGALTSGVHTFPAVLQSSGLYSLSSVVTVPSSS | |
| | | LGTQTYICNVNHKPSNTKVDKKVEPKSCDKTHTCPPCPAPEAAGPSVFL | |
| | | FPPKPKDTLMISRTPEVTCVVVDVSHEDPEVKFNWYVDGVEVHNAKTKP | |
| | | REEQYNSTYRVVSVLTVLHQDWLNGKEYKCKVSNKALPAPIEKTISKAK | |
| | | GQPREPQVYTLPPSREEMTKNQVSLWCLVKGFYPSDIAVEWESNGQPEN | |
| | | NYKTTPPVLDSDGSFFLYSKLTVDKSRWQQGNVFSCSVMHEALHNHYTQ | |
| | | KSLSLSPGGGGGSGGGGSGGGGSGGGGSDIQMTQSPSSLSASVGDRVTI | |
| | | TCRASQDISNYLNWYQQKPGKAPKLLIYYTSRLRSGVPSRFSGSGSGTD | |
| | | FTLTISSLQPEDFATYYCQQGHTLPPTFGQGTKVEIKGGGGSGGGGSGG | |
| | | GGSGGGGSEVQLVQSGAEVKKPGASVKVSCKASGYTFTDSYMSWVRQAP | |
| | | GQGLEWIGDMYPDNGDSSYNQKFRERVTITRDTSTSTAYLELSSLRSED | |
| | | TAVYYCVLAPRWYFSVWGQGTLVTVSS | |
| | 2^{nd} | QVQLVQSGAEVKKPGASVKVSCKASGYTFTSYVMHWVRQKPGQGLEWIG | 645 |
| | chain | YINPYNEGTESTDKFKGRATMTSDKSTSTVYMELSSLRSEDTAVYYCAS | |
| | | IYYGYEGTYFGVWGQGTLVTVSSASTKGPSVFPLAPSSKSTSGGTAALG | |
| | | CLVKDYFPEPVTVSWNSGALTSGVHTFPAVLQSSGLYSLSSVVTVPSSS | |
| | | LGTQTYICNVNHKPSNTKVDKKVEPKSCDKTHTCPPCPAPEAAGPSVFL | |
| | | FPPKPKDTLMISRTPEVTCVVVDVSHEDPEVKFNWYVDGVEVHNAKTKP | |
| | | REEQYNSTYRVVSVLTVLHQDWLNGKEYKCKVSNKALPAPIEKTISKAK | |
| | | GQPREPQVYTLPPSREEMTKNQVSLSCAVKGFYPSDIAVEWESNGQPEN | |
| | | NYKTTPPVLDSDGSFFLVSKLTVDKSRWQQGNVFSCSVMHEALHNRFTQ | |
| | | KSLSLSPGGGGGSGGGGSGGGGSGGGGSDIQMTQSPSTLSASVGDRVTI | |
| | | TCSASSSVSYMNWYQQKPGKAPKLLIYDTSKLASGVPSRFSGSGSGTEF | |
| | | TLTISSLQPDDFATYYCQQWSSNPFTFGQGTKLEIKGGGGSGGGGSGGG | |
| | | GSGGGGSQVQLVQSGAEVKKPGASVKVSCKASGYTFTRYTMHWVRQAPG | |
| | | QGLEWMGYINPSRGYTNYNQKFKDRVTMTRDTSTSTVYMELSSLRSEDT | |
| | | AVYYCARYYDDHYCLDYWGQGTLVTVSS | |
| | 3^{rd} | EIVLTQSPATLSLSPGERATLSCRASSSVSYMHWYQQKPGQAPRPWIYA | 646 |
| | chain | TSNLASGIPARFSGSRSGTDYTLTISSLEPEDFAVYYCQQWSSNTLTFG | |
| | | GGTKVEIKRTVAAPSVFIFPPSDEQLKSGTASVVCLLNNFYPREAKVQW | |
| | | KVDNALQSGNSQESVTEQDSKDSTYSLSSTLTLSKADYEKHKVYACEVT | |
| | | HQGLSSPVTKSFNRGEC | |
| Ly1934 | 1^{st} | QVQLVQSGAEVKKPGASVKVSCKASGYTFTSYVMHWVRQKPGQGLEWIG | 647 |
| | chain | YINPYNEGTESTDKFKGRATMTSDKSTSTVYMELSSLRSEDTAVYYCAS | |
| | | IYYGYEGTYFGVWGQGTLVTVSSASTKGPSVFPLAPSSKSTSGGTAALG | |
| | | CLVKDYFPEPVTVSWNSGALTSGVHTFPAVLQSSGLYSLSSVVTVPSSS | |
| | | LGTQTYICNVNHKPSNTKVDKKVEPKSCGGGGSGGGGSGGGGSGGGGSE | |
| | | VQLVESGGGLVQPGGSLRLSCAASGFTFSTYAMNWVRQAPGKGLEWVGR | |
| | | IRSKYNNYATYYADSVKGRFTISRDDSKNSLYLQMNSLKTEDTAVYYCV | |
| | | RHGNFGNSYVSWFAYWGQGTLVTVSSPAPEAAGPSVFLFPPKPKDTLMI | |
| | | SRTPEVTCVVVDVSHEDPEVKFNWYVDGVEVHNAKTKPREEQYNSTYRV | |
| | | VSVLTVLHQDWLNGKEYKCKVSNKALPAPIEKTISKAKGQPREPQVYTL | |
| | | PPSREEMTKNQVSLWCLVKGFYPSDIAVEWESNGQPENNYKTTPPVLDS | |
| | | DGSFFLYSKLTVDKSRWQQGNVFSCSVMHEALHNHYTQKSLSLSPGK | |
| | 2^{nd} | QVQLVQSGAEVKKPGASVKVSCKASGYTFTSYVMHWVRQKPGQGLEWIG | 648 |
| | chain | YINPYNEGTESTDKFKGRATMTSDKSTSTVYMELSSLRSEDTAVYYCAS | |
| | | IYYGYEGTYFGVWGQGTLVTVSSASTKGPSVFPLAPSSKSTSGGTAALG | |
| | | CLVKDYFPEPVTVSWNSGALTSGVHTFPAVLQSSGLYSLSSVVTVPSSS | |
| | | LGTQTYICNVNHKPSNTKVDKKVEPKSCGGGGSGGGGSGGGGSGGGGSE | |
| | | VQLVQSGAEVKKPGASVKVSCKASGYTFTDSYMSWVRQAPGQGLEWIGD | |
| | | MYPDNGDSSYNQKFRERVTITRDTSTSTAYLELSSLRSEDTAVYYCVLA | |
| | | PRWYFSVWGQGTLVTVSSASVAAPSVFIFPPSDEQLKSGTASVVCLLNN | |
| | | FYPREAKVQWKVDNALQSGNSQESVTEQDSKDSTYSLSSTLTLSKADYE | |
| | | KHKVYACEVTHQGLSSPVTKSFNRGECGGGGSGGGGSGGGGSGGGGSQA | |
| | | VVTQEPSLTVSPGGTVTLTCRSSTGAVTTSNYANWVQQKPGQAPRGLIG | |
| | | GTNKRAPWTPARFSGSLLGGKAALTITGAQAEDEADYYCALWYSNLWVF | |
| | | GGGTKLTVLPAPEAAGPSVFLFPPKPKDTLMISRTPEVTCVVVDVSHED | |
| | | PEVKFNWYVDGVEVHNAKTKPREEQYNSTYRVVSVLTVLHQDWLNGKEY | |
| | | KCKVSNKALPAPIEKTISKAKGQPREPQVYTLPPSREEMTKNQVSLSCA | |
| | | VKGFYPSDIAVEWESNGQPENNYKTTPPVLDSDGSFFLVSKLTVDKSRW | |
| | | QQGNVFSCSVMHEALHNRFTQKSLSLSPGK | |
| | 3^{rd} | EIVLTQSPATLSLSPGERATLSCRASSSVSYMHWYQQKPGQAPRPWIYA | 649 |
| | chain | TSNLASGIPARFSGSRSGTDYTLTISSLEPEDFAVYYCQQWSSNTLTFG | |
| | | GGTKVEIKRTVAAPSVFIFPPSDEQLKSGTASVVCLLNNFYPREAKVQW | |
| | | KVDNALQSGNSQESVTEQDSKDSTYSLSSTLTLSKADYEKHKVYACEVT | |
| | | HQGLSSPVTKSFNRGEC | |
| | 4^{th} | DIQMTQSPSSLSASVGDRVTITCRASQDISNYLNWYQQKPGKAPKLLIY | 650 |
| | chain | YTSRLRSGVPSRFSGSGSGTDFTLTISSLQPEDFATYYCQQGHTLPPTF | |
| | | GQGTKVEIKSSASTKGPSVFPLAPSSKSTSGGTAALGCLVKDYFPEPVT | |
| | | VSWNSGALTSGVHTFPAVLQSSGLYSLSSVVTVPSSSLGTQTYICNVNH | |
| | | KPSNTKVDKKVEPKSC | |

### Characterization of Anti-B7H3/CD3/GITR Tri-Specific Antibodies

[0363] These tri-specific antibodies are evaluated for their in vitro and in vivo activity, including binding to target antigen (B37H3, CD3 and GITR), agonistic activity in CD3 and GITR reporter assay system, activation of immune cells, anti-tumor activity in mouse models.

### Example 13: Anti-B7H3/CD137/OX40 Tri-Specific Antibodies

[0364] Anti-B7H3/CD137/OX40 tri-specific were produced using the same parent anti-B37H3 and anti-CD137 antibodies disclosed above and the anti-OX40 parent antibody Ly598 (OX40 Ab1). The sequences of the parent antibody clones are provided in Table 1 above.

[0365] cDNAs encoding the V_{H} and V_{L} chains of these parent antibodies were used as the starting materials for making the tri-specific antibodies. CHO-cell transient expression was carried out with plasmids configured for expressing polypeptide chains of the tri-specific antibodies. These antibodies were purified by protein A affinity chromatography.

[0366] The amino acid sequences of the polypeptide chains of the tri-specific antibodies are provided in Table 13 below:

TABLE 13
Exemplary Anti-B7H3/CD137/OX40 Tri-Specific Antibodies

| | | | SED ID |
|---|---|---|---|
| Antibody Clones | | Amino acid sequence | NO: |
| Ly2076 | 1^{st} | QVQLVQSGAEVKKPGASVKVSCKASGYTFTSYVMHWVRQKPGQGLEWIG | 651 |
| | chain | YINPYNEGTESTDKFKGRATMTSDKSTSTVYMELSSLRSEDTAVYYCAS | |
| | | IYYGYEGTYFGVWGQGTLVTVSSASTKGPSVFPLAPSSKSTSGGTAALG | |
| | | CLVKDYFPEPVTVSWNSGALTSGVHTFPAVLQSSGLYSLSSVVTVPSSS | |
| | | LGTQTYICNVNHKPSNTKVDKKVEPKSCDKTHTCPPCPAPELLGPSVFL | |
| | | FPPKPKDTLMISRTPEVTCVVVDVSHEDPEVKFNWYVDGVEVHNAKTKP | |
| | | REEQYNSTYRVVSVLTVLHQDWLNGKEYKCKVSNKALPAPIEKTISKAK | |
| | | GQPREPQVYTLPPSREEMTKNQVSLTCLVKGFYPSDIAVEWESNGQPEN | |
| | | NYKTTPPVLDSDGSFFLYSKLTVDKSRWQQGNVFSCSVMHEALHNHYTQ | |
| | | KSLSLSPGGGGGSGGGGSGGGGSGGGGSDIQMTQSPSSLSASVGDRVTI | |
| | | TCRASQDIRSNLNWYQQKPGGAVKLLIYYTSRLHSGVPSRFSGSGSGTD | |
| | | YTLTISSLQPEDFATYFCQQSEKLPRTFGGGTKVEIRGGGGSGGGGSGG | |
| | | GGSGGGGSQVQLVQSGAEVKKPGASVKVSCKASGYTFAGFEMHWVRQAP | |
| | | GQGLEWMGAIDPKTGGTDYNQKFKDRVTMTRDTSISTAYMELSRLRSDD | |
| | | TAVYYCARDLGYFDVWGQGTLVTVSS | |
| | 2^{nd} | EIVLTQSPATLSLSPGERATLSCRASSSVSYMHWYQQKPGQAPRPWIYA | 652 |
| | chain | TSNLASGIPARFSGSRSGTDYTLTISSLEPEDFAVYYCQQWSSNTLTFG | |
| | | GGTKVEIKRTVAAPSVFIFPPSDEQLKSGTASVVCLLNNFYPREAKVQW | |
| | | KVDNALQSGNSQESVTEQDSKDSTYSLSSTLTLSKADYEKHKVYACEVT | |
| | | HQGLSSPVTKSFNRGECGGGGSGGGGSGGGGSGGGGSDIQMTQSPSSLS | |
| | | ASVGDRVTITCRASQDISNYLNWYQQKPGKAPKLLIYYTSRLRSGVPSR | |
| | | FSGSGSGTDFTLTISSLQPEDFATYYCQQGHTLPPTFGQGTKVEIKGGG | |
| | | GSGGGGSGGGGSGGGGSEVQLVQSGAEVKKPGASVKVSCKASGYTFTDS | |
| | | YMSWVRQAPGQGLEWIGDMYPDNGDSSYNQKFRERVTITRDTSTSTAYL | |
| | | ELSSLRSEDTAVYYCVLAPRWYFSVWGQGTLVTVSS | |
| Ly2077 | 1^{st} | QVQLVQSGAEVKKPGASVKVSCKASGYTFTSYVMHWVRQKPGQGLEWIG | 653 |
| | chain | YINPYNEGTESTDKFKGRATMTSDKSTSTVYMELSSLRSEDTAVYYCAS | |
| | | IYYGYEGTYFGVWGQGTLVTVSSASTKGPSVFPLAPSSKSTSGGTAALG | |
| | | CLVKDYFPEPVTVSWNSGALTSGVHTFPAVLQSSGLYSLSSVVTVPSSS | |
| | | LGTQTYICNVNHKPSNTKVDKKVEPKSCDKTHTCPPCPAPELLGPSVFL | |
| | | FPPKPKDTLMISRTPEVTCVVVDVSHEDPEVKFNWYVDGVEVHNAKTKP | |
| | | REEQYNSTYRVVSVLTVLHQDWLNGKEYKCKVSNKALPAPIEKTISKAK | |
| | | GQPREPQVYTLPPSREEMTKNQVSLTCLVKGFYPSDIAVEWESNGQPEN | |
| | | NYKTTPPVLDSDGSFFLYSKLTVDKSRWQQGNVFSCSVMHEALHNHYTQ | |
| | | KSLSLSPGGGGGSGGGGSGGGGSGGGGSDIQMTQSPSSLSASVGDRVTI | |
| | | TCRASQDIRSNLNWYQQKPGGAVKLLIYYTSRLHSGVPSRFSGSGSGTD | |
| | | YTLTISSLQPEDFATYFCQQSEKLPRTFGGGTKVEIRGGGGSGGGGSGG | |
| | | GGSGGGGSQVQLVQSGAEVKKPGASVKVSCKASGYTFAGFEMHWVRQAP | |
| | | GQGLEWMGAIDPKTGGTDYNQKFKDRVTMTRDTSISTAYMELSRLRSDD | |
| | | TAVYYCARDLGYFDVWGQGTLVTVSS | |
| | 2^{nd} | EIVLTQSPATLSLSPGERATLSCRASSSVSYMHWYQQKPGQAPRPWIYA | 654 |
| | chain | TSNLASGIPARFSGSRSGTDYTLTISSLEPEDFAVYYCQQWSSNTLTFG | |
| | | GGTKVEIKRTVAAPSVFIFPPSDEQLKSGTASVVCLLNNFYPREAKVQW | |
| | | KVDNALQSGNSQESVTEQDSKDSTYSLSSTLTLSKADYEKHKVYACEVT | |
| | | HQGLSSPVTKSFNRGECGGGGSGGGGSGGGGSGGGGSDIQMTQSPSSLS | |
| | | ASVGDRVTITCRASQDISNYLNWYQQKPGKAPKLLIYYTSRLRSGVPSR | |
| | | FSGSGSGTDFTLTISSLQPEDFATYYCQQGHTLPPTFGQGTKVEIKGGG | |
| | | GSGGGGSGGGGSGGGGSEVQLVQSGAEVKKPGASVKVSCKASGYTFTDS | |
| | | YMSWVRQAPGQGLEWIGDMYPDNGDSSYNQKFRERVTITRDTSTSTAYL | |
| | | ELSSLRSEDTAVYYCVLAPRWYFSVWGQGTLVTVSS | |
| Ly2078 | 1^{st} | QVQLVQSGAEVKKPGASVKVSCKASGYTFTSYVMHWVRQKPGQGLEWIG | 655 |
| | chain | YINPYNEGTESTDKFKGRATMTSDKSTSTVYMELSSLRSEDTAVYYCAS | |
| | | IYYGYEGTYFGVWGQGTLVTVSSASTKGPSVFPLAPSSKSTSGGTAALG | |
| | | CLVKDYFPEPVTVSWNSGALTSGVHTFPAVLQSSGLYSLSSVVTVPSSS | |
| | | LGTQTYICNVNHKPSNTKVDKKVEPKSCDKTHTCPPCPAPELLGPSVFL | |
| | | FPPKPKDTLMISRTPEVTCVVVDVSHEDPEVKFNWYVDGVEVHNAKTKP | |
| | | REEQYNSTYRVVSVLTVLHQDWLNGKEYKCKVSNKALPAPIEKTISKAK | |
| | | GQPREPQVYTLPPSREEMTKNQVSLWCLVKGFYPSDIAVEWESNGQPEN | |
| | | NYKTTPPVLDSDGSFFLYSKLTVDKSRWQQGNVFSCSVMHEALHNHYTQ | |
| | | KSLSLSPGGGGGSGGGGSGGGGSGGGGSDIQMTQSPSSLSASVGDRVTI | |
| | | TCRASQDIRSNLNWYQQKPGGAVKLLIYYTSRLHSGVPSRFSGSGSGTD | |
| | | YTLTISSLQPEDFATYFCQQSEKLPRTFGGGTKVEIRGGGGSGGGGSGG | |
| | | GGSGGGGSQVQLVQSGAEVKKPGASVKVSCKASGYTFAGFEMHWVRQAP | |
| | | GQGLEWMGAIDPKTGGTDYNQKFKDRVTMTRDTSISTAYMELSRLRSDD | |
| | | TAVYYCARDLGYFDVWGQGTLVTVSS | |
| | 2^{nd} | QVQLVQSGAEVKKPGASVKVSCKASGYTFTSYVMHWVRQKPGQGLEWIG | 656 |
| | chain | YINPYNEGTESTDKFKGRATMTSDKSTSTVYMELSSLRSEDTAVYYCAS | |
| | | IYYGYEGTYFGVWGQGTLVTVSSASTKGPSVFPLAPSSKSTSGGTAALG | |
| | | CLVKDYFPEPVTVSWNSGALTSGVHTFPAVLQSSGLYSLSSVVTVPSSS | |
| | | LGTQTYICNVNHKPSNTKVDKKVEPKSCDKTHTCPPCPAPELLGPSVFL | |
| | | FPPKPKDTLMISRTPEVTCVVVDVSHEDPEVKFNWYVDGVEVHNAKTKP | |
| | | REEQYNSTYRVVSVLTVLHQDWLNGKEYKCKVSNKALPAPIEKTISKAK | |
| | | GQPREPQVYTLPPSREEMTKNQVSLSCAVKGFYPSDIAVEWESNGQPEN | |
| | | NYKTTPPVLDSDGSFFLVSKLTVDKSRWQQGNVFSCSVMHEALHNRFTQ | |
| | | KSLSLSPGGGGGSGGGGSGGGGSGGGGSDIQMTQSPSSLSASVGDRVTI | |
| | | TCRASQDISNYLNWYQQKPGKAPKLLIYYTSRLRSGVPSRFSGSGSGTD | |
| | | FTLTISSLQPEDFATYYCQQGHTLPPTFGQGTKVEIKGGGGSGGGGSGG | |
| | | GGSGGGGSEVQLVQSGAEVKKPGASVKVSCKASGYTFTDSYMSWVRQAP | |
| | | GQGLEWIGDMYPDNGDSSYNQKFRERVTITRDTSTSTAYLELSSLRSED | |
| | | TAVYYCVLAPRWYFSVWGQGTLVTVSS | |
| | 3^{rd} | EIVLTQSPATLSLSPGERATLSCRASSSVSYMHWYQQKPGQAPRPWIYA | 657 |
| | chain | TSNLASGIPARFSGSRSGTDYTLTISSLEPEDFAVYYCQQWSSNTLTFG | |
| | | GGTKVEIKRTVAAPSVFIFPPSDEQLKSGTASVVCLLNNFYP | |
| | | REAKVQWKVDNALQSGNSQESVTEQDSKDSTYSLSSTLTLS | |
| | | KADYEKHKVYACEVTHQGLSSPVTKSFNRGEC | |

### Characterization of Anti-B7H3/CD137/OX40 Tri-Specific Antibodies

[0367] These tri-specific antibodies are evaluated for their in vitro and in vivo activity, including binding to target antigen (B7H3, CD137 and OX40), agonistic activity in CD137 and OX40 reporter assay system, activation of immune cells, anti-tumor activity in mouse models.

### Example 14: Anti-B7H3/CD137/GITR Tri-Specific Antibodies

[0368] Anti-B7H3/CD137/GITR tri-specific were produced using the same anti-B7H3 and anti-CD137 parent clones disclosed above and the anti-GITR parent antibody GITR Ab1. The sequences of the parent antibody clones are provided in Table 1 above.

[0369] cDNAs encoding the V_{H} and V_{L} chains of these parent antibodies were used as the starting materials for making the tri-specific antibodies. CHO-cell transient expression was carried out with plasmids configured for expressing polypeptide chains of the tri-specific antibodies. These antibodies were purified by protein A affinity chromatography.

[0370] The amino acid sequences of the polypeptide chains of the tri-specific antibodies are provided in Table 14 below:

TABLE 14
Exemplary Anti-B7H3/CD137/GITR Tri-Specific Antibodies

| | | | SED ID |
|---|---|---|---|
| Antibody Clones | | Amino acid sequence | NO: |
| Ly2079 | 1^{st} | QVQLVQSGAEVKKPGASVKVSCKASGYTFTSYVMHWVRQKPGQGLEWIG | 658 |
| | chain | YINPYNEGTESTDKFKGRATMTSDKSTSTVYMELSSLRSEDTAVYYCAS | |
| | | IYYGYEGTYFGVWGQGTLVTVSSASTKGPSVFPLAPSSKSTSGGTAALG | |
| | | CLVKDYFPEPVTVSWNSGALTSGVHTFPAVLQSSGLYSLSSVVTVPSSS | |
| | | LGTQTYICNVNHKPSNTKVDKKVEPKSCDKTHTCPPCPAPELLGPSVFL | |
| | | FPPKPKDTLMISRTPEVTCVVVDVSHEDPEVKFNWYVDGVEVHNAKTKP | |
| | | REEQYNSTYRVVSVLTVLHQDWLNGKEYKCKVSNKALPAPIEKTISKAK | |
| | | GQPREPQVYTLPPSREEMTKNQVSLTCLVKGFYPSDIAVEWESNGQPEN | |
| | | NYKTTPPVLDSDGSFFLYSKLTVDKSRWQQGNVFSCSVMHEALHNHYTQ | |
| | | KSLSLSPGGGGGSGGGGSGGGGSGGGGSDIQMTQSPSSLSASVGDRVTI | |
| | | TCRASQDIRSNLNWYQQKPGGAVKLLIYYTSRLHSGVPSRFSGSGSGTD | |
| | | YTLTISSLQPEDFATYFCQQSEKLPRTFGGGTKVEIRGGGGSGGGGSGG | |
| | | GGSGGGGSQVQLVQSGAEVKKPGASVKVSCKASGYTFAGFEMHWVRQAP | |
| | | GQGLEWMGAIDPKTGGTDYNQKFKDRVTMTRDTSISTAYMELSRLRSDD | |
| | | TAVYYCARDLGYFDVWGQGTLVTVSS | |
| | 2^{nd} | EIVLTQSPATLSLSPGERATLSCRASSSVSYMHWYQQKPGQAPRPWIYA | 659 |
| | chain | TSNLASGIPARFSGSRSGTDYTLTISSLEPEDFAVYYCQQWSSNTLTFG | |
| | | GGTKVEIKRTVAAPSVFIFPPSDEQLKSGTASVVCLLNNFYPREAKVQW | |
| | | KVDNALQSGNSQESVTEQDSKDSTYSLSSTLTLSKADYEKHKVYACEVT | |
| | | HQGLSSPVTKSFNRGECGGGGSGGGGSGGGGSGGGGSDIQMTQSPSSLS | |
| | | ASVGDRVTITCRASQDISNYLNWYQQKPGKAPKLLIYYTSRLRSGVPSR | |
| | | FSGSGSGTDFTLTISSLQPEDFATYYCQQGHTLPPTFGQGTKVEIKGGG | |
| | | GSGGGGSGGGGSGGGGSEVQLVQSGAEVKKPGASVKVSCKASGYTFTDS | |
| | | YMSWVRQAPGQGLEWIGDMYPDNGDSSYNQKFRERVTITRDTSTSTAYL | |
| | | ELSSLRSEDTAVYYCVLAPRWYFSVWGQGTLVTVSS | |
| Ly2080 | 1^{st} | QVQLVQSGAEVKKPGASVKVSCKASGYTFTSYVMHWVRQKPGQGLEWIG | 660 |
| | chain | YINPYNEGTESTDKFKGRATMTSDKSTSTVYMELSSLRSEDTAVYYCAS | |
| | | IYYGYEGTYFGVWGQGTLVTVSSASTKGPSVFPLAPSSKSTSGGTAALG | |
| | | CLVKDYFPEPVTVSWNSGALTSGVHTFPAVLQSSGLYSLSSVVTVPSSS | |
| | | LGTQTYICNVNHKPSNTKVDKKVEPKSCDKTHTCPPCPAPELLGPSVFL | |
| | | FPPKPKDTLMISRTPEVTCVVVDVSHEDPEVKFNWYVDGVEVHNAKTKP | |
| | | REEQYNSTYRVVSVLTVLHQDWLNGKEYKCKVSNKALPAPIEKTISKAK | |
| | | GQPREPQVYTLPPSREEMTKNQVSLTCLVKGFYPSDIAVEWESNGQPEN | |
| | | NYKTTPPVLDSDGSFFLYSKLTVDKSRWQQGNVFSCSVMHEALHNHYTQ | |
| | | KSLSLSPGGGGGSGGGGSGGGGSGGGGSDIQMTQSPSSLSASVGDRVTI | |
| | | TCRASQDIRSNLNWYQQKPGGAVKLLIYYTSRLHSGVPSRFSGSGSGTD | |
| | | YTLTISSLQPEDFATYFCQQSEKLPRTFGGGTKVEIRGGGGSGGGGSGG | |
| | | GGSGGGGSQVQLVQSGAEVKKPGASVKVSCKASGYTFAGFEMHWVRQAP | |
| | | GQGLEWMGAIDPKTGGTDYNQKFKDRVTMTRDTSISTAYMELSRLRSDD | |
| | | TAVYYCARDLGYFDVWGQGTLVTVSS | |
| | 2^{nd} | EIVLTQSPATLSLSPGERATLSCRASSSVSYMHWYQQKPGQAPRPWIYA | 661 |
| | chain | TSNLASGIPARFSGSRSGTDYTLTISSLEPEDFAVYYCQQWSSNTLTFG | |
| | | GGTKVEIKRTVAAPSVFIFPPSDEQLKSGTASVVCLLNNFYPREAKVQW | |
| | | KVDNALQSGNSQESVTEQDSKDSTYSLSSTLTLSKADYEKHKVYACEVT | |
| | | HQGLSSPVTKSFNRGECGGGGSGGGGSGGGGSGGGGSDIQMTQSPSSLS | |
| | | ASVGDRVTITCRASQDISNYLNWYQQKPGKAPKLLIYYTSRLRSGVPSR | |
| | | FSGSGSGTDFTLTISSLQPEDFATYYCQQGHTLPPTFGQGTKVEIKGGG | |
| | | GSGGGGSGGGGSGGGGSEVQLVQSGAEVKKPGASVKVSCKASGYTFTDS | |
| | | YMSWVRQAPGQGLEWIGDMYPDNGDSSYNQKFRERVTITRDTSTSTAYL | |
| | | ELSSLRSEDTAVYYCVLAPRWYFSVWGQGTLVTVSS | |
| Ly2081 | 1^{st} | QVQLVQSGAEVKKPGASVKVSCKASGYTFTSYVMHWVRQKPGQGLEWIG | 662 |
| | chain | YINPYNEGTESTDKFKGRATMTSDKSTSTVYMELSSLRSEDTAVYYCAS | |
| | | IYYGYEGTYFGVWGQGTLVTVSSASTKGPSVFPLAPSSKSTSGGTAALG | |
| | | CLVKDYFPEPVTVSWNSGALTSGVHTFPAVLQSSGLYSLSSVVTVPSSS | |
| | | LGTQTYICNVNHKPSNTKVDKKVEPKSCDKTHTCPPCPAPELLGPSVFL | |
| | | FPPKPKDTLMISRTPEVTCVVVDVSHEDPEVKFNWYVDGVEVHNAKTKP | |
| | | REEQYNSTYRVVSVLTVLHQDWLNGKEYKCKVSNKALPAPIEKTISKAK | |
| | | GQPREPQVYTLPPSREEMTKNQVSLWCLVKGFYPSDIAVEWESNGQPEN | |
| | | NYKTTPPVLDSDGSFFLYSKLTVDKSRWQQGNVFSCSVMHEALHNHYTQ | |
| | | KSLSLSPGGGGGSGGGGSGGGGSGGGGSDIQMTQSPSSLSASVGDRVTI | |
| | | TCRASQDIRSNLNWYQQKPGGAVKLLIYYTSRLHSGVPSRFSGSGSGTD | |
| | | YTLTISSLQPEDFATYFCQQSEKLPRTFGGGTKVEIRGGGGSGGGGSGG | |
| | | GGSGGGGSQVQLVQSGAEVKKPGASVKVSCKASGYTFAGFEMHWVRQAP | |
| | | GQGLEWMGAIDPKTGGTDYNQKFKDRVTMTRDTSISTAYMELSRLRSDD | |
| | | TAVYYCARDLGYFDVWGQGTLVTVSS | |
| | 2^{nd} | QVQLVQSGAEVKKPGASVKVSCKASGYTFTSYVMHWVRQKPGQGLEWIG | 663 |
| | chain | YINPYNEGTESTDKFKGRATMTSDKSTSTVYMELSSLRSEDTAVYYCAS | |
| | | IYYGYEGTYFGVWGQGTLVTVSSASTKGPSVFPLAPSSKSTSGGTAALG | |
| | | CLVKDYFPEPVTVSWNSGALTSGVHTFPAVLQSSGLYSLSSVVTVPSSS | |
| | | LGTQTYICNVNHKPSNTKVDKKVEPKSCDKTHTCPPCPAPELLGPSVFL | |
| | | FPPKPKDTLMISRTPEVTCVVVDVSHEDPEVKFNWYVDGVEVHNAKTKP | |
| | | REEQYNSTYRVVSVLTVLHQDWLNGKEYKCKVSNKALPAPIEKTISKAK | |
| | | GQPREPQVYTLPPSREEMTKNQVSLSCAVKGFYPSDIAVEWESNGQPEN | |
| | | NYKTTPPVLDSDGSFFLVSKLTVDKSRWQQGNVFSCSVMHEALHNRFTQ | |
| | | KSLSLSPGGGGGSGGGGSGGGGSGGGGSDIQMTQSPSSVSASVGDRVTI | |
| | | TCRASQGIYSWLAWYQQKPGKAPNLLIYTASTLQSGVPSRFSGSGSGTD | |
| | | FTLTISSLQPEDFATYYCQQANIFPLTFGGGTKVEIKGGGGSGGGGSGG | |
| | | GGSGGGGSQVQLVQSGAEVKKPGASVKVSCKASGYTFTGYYMHWVRQAP | |
| | | GQGLEWMGWINPDSGGTNYAQKFQGRVTMTRDTSISTAYMELNRLRSDD | |
| | | TAVYYCARDQPLGYCTNGVCSYFDYWGQGTLVTVSS | |
| | 3^{rd} | EIVLTQSPATLSLSPGERATLSCRASSSVSYMHWYQQKPGQAPRPWIYA | 664 |
| | chain | TSNLASGIPARFSGSRSGTDYTLTISSLEPEDFAVYYCQQWSSNTLTFG | |
| | | GGTKVEIKRTVAAPSVFIFPPSDEQLKSGTASVVCLLNNFYPREAKVQW | |
| | | KVDNALQSGNSQESVTEQDSKDSTYSLSSTLTLSKADYEKHKVYACEVT | |
| | | HQGLSSPVTKSFNRGEC | |

### Characterization of Anti-B7H3/CD137/GITR Tri-Specific Antibodies

[0371] These tri-specific antibodies are evaluated for their in vitro and in vivo activity, including binding to target antigen (B7H3, CD137 and GITR), agonistic activity in CD137 and GITR reporter assay system, activation of immune cells, anti-tumor activity in mouse models.

### OTHER EMBODIMENTS

[0372] All of the features disclosed in this specification may be combined in any combination. Each feature disclosed in this specification may be replaced by an alternative feature serving the same, equivalent, or similar purpose. Thus, unless expressly stated otherwise, each feature disclosed is only an example of a generic series of equivalent or similar features.

[0373] From the above description, one skilled in the art can easily ascertain the essential characteristics of the present invention, and without departing from the spirit and scope thereof, can make various changes and modifications of the invention to adapt it to various usages and conditions. Thus, other embodiments are also within the claims.

### EQUIVALENTS

[0374] While several inventive embodiments have been described and illustrated herein, those of ordinary skill in the art will readily envision a variety of other means and/or structures for performing the function and/or obtaining the results and/or one or more of the advantages described herein, and each of such variations and/or modifications is deemed to be within the scope of the inventive embodiments described herein. More generally, those skilled in the art will readily appreciate that all parameters, dimensions, materials, and configurations described herein are meant to be exemplary and that the actual parameters, dimensions, materials, and/or configurations will depend upon the specific application or applications for which the inventive teachings is/are used. Those skilled in the art will recognize, or be able to ascertain using no more than routine experimentation, many equivalents to the specific inventive embodiments described herein. It is, therefore, to be understood that the foregoing embodiments are presented by way of example only and that, within the scope of the appended claims and equivalents thereto, inventive embodiments may be practiced otherwise than as specifically described and claimed. Inventive embodiments of the present disclosure are directed to each individual feature, system, article, material, kit, and/or method described herein. In addition, any combination of two or more such features, systems, articles, materials, kits, and/or methods, if such features, systems, articles, materials, kits, and/or methods are not mutually inconsistent, is included within the inventive scope of the present disclosure.

[0375] All definitions, as defined and used herein, should be understood to control over dictionary definitions, definitions in documents incorporated by reference, and/or ordinary meanings of the defined terms.

[0376] All references, patents and patent applications disclosed herein are incorporated by reference with respect to the subject matter for which each is cited, which in some cases may encompass the entirety of the document.

[0377] The indefinite articles “a” and “an,” as used herein in the specification and in the claims, unless clearly indicated to the contrary, should be understood to mean “at least one.”

[0378] The phrase “and/or,” as used herein in the specification and in the claims, should be understood to mean “either or both” of the elements so conjoined, i.e., elements that are conjunctively present in some cases and disjunctively present in other cases. Multiple elements listed with “and/or” should be construed in the same fashion, i.e., “one or more” of the elements so conjoined. Other elements may optionally be present other than the elements specifically identified by the “and/or” clause, whether related or unrelated to those elements specifically identified. Thus, as a non-limiting example, a reference to “A and/or B”, when used in conjunction with open-ended language such as “comprising” can refer, in one embodiment, to A only (optionally including elements other than B); in another embodiment, to B only (optionally including elements other than A); in yet another embodiment, to both A and B (optionally including other elements); etc.

[0379] As used herein in the specification and in the claims, “or” should be understood to have the same meaning as “and/or” as defined above. For example, when separating items in a list, “or” or “and/or” shall be interpreted as being inclusive, i.e., the inclusion of at least one, but also including more than one, of a number or list of elements, and, optionally, additional unlisted items. Only terms clearly indicated to the contrary, such as “only one of” or “exactly one of,” or, when used in the claims, “consisting of,” will refer to the inclusion of exactly one element of a number or list of elements. In general, the term “or” as used herein shall only be interpreted as indicating exclusive alternatives (i.e. “one or the other but not both”) when preceded by terms of exclusivity, such as “either,” “one of,” “only one of,” or “exactly one of.” “Consisting essentially of,” when used in the claims, shall have its ordinary meaning as used in the field of patent law.

[0380] As used herein in the specification and in the claims, the phrase “at least one,” in reference to a list of one or more elements, should be understood to mean at least one element selected from any one or more of the elements in the list of elements, but not necessarily including at least one of each and every element specifically listed within the list of elements and not excluding any combinations of elements in the list of elements. This definition also allows that elements may optionally be present other than the elements specifically identified within the list of elements to which the phrase “at least one” refers, whether related or unrelated to those elements specifically identified. Thus, as a non-limiting example, “at least one of A and B” (or, equivalently, “at least one of A or B,” or, equivalently “at least one of A and/or B”) can refer, in one embodiment, to at least one, optionally including more than one, A, with no B present (and optionally including elements other than B); in another embodiment, to at least one, optionally including more than one, B, with no A present (and optionally including elements other than A); in yet another embodiment, to at least one, optionally including more than one, A, and at least one, optionally including more than one, B (and optionally including other elements); etc.

[0381] It should also be understood that, unless clearly indicated to the contrary, in any methods claimed herein that include more than one step or act, the order of the steps or acts of the method is not necessarily limited to the order in which the steps or acts of the method are recited.

1. A multi-specific antibody, comprising:
(a) a first antigen binding moiety binding to a first antigen, wherein the first antigen binding moiety comprising a first heavy chain variable region (V_{H}) and a first light chain variable region (V_{L}); and
(b) a second antigen binding moiety binding to a second antigen, wherein the second antigen binding moiety comprising a second V_{H} and a second V_{L}; and optionally
(c) a third antigen binding moiety binding to a third antigen, wherein the third antigen binding moiety comprising a third V_{H} and a third V_{L};
wherein one of the first antigen and the second antigen is human B7H3 and the other one is selected from the group consisting of human CD40, human CD137, human Glucocorticoid-Induced TNFR-Related protein (GITR), human OX40, human CD3, human CD28, and human CD47; and
wherein the optional third antigen is selected from the group consisting of human CD40, human CD137, human Glucocorticoid-Induced TNFR-Related protein (GITR), human OX40, human CD3, human CD28, and human CD47; the optional third antigen being different from the first antigen and the second antigen.

2. The multi-specific antibody of claim 1, wherein the antigen binding moiety that binds B7H3 comprises (i) a heavy chain variable region (V_{H}) that comprises the same heavy chain complementary determining regions (CDRs) as antibody B7H3 Ab1 or B7H3 Ab2, and (ii) a light chain variable region (V_{L}) that comprises the same light chain CDRs as antibody B7H3 Ab1 or B7H3 Ab2.

3. The multi-specific antibody of claim 1, wherein the antigen binding moiety that binds B7H3 comprises (i) a heavy chain variable region (V_{H}) that comprises heavy chain complementary determining regions (CDRs), which collectively contain up to 5 amino acid residue variations relative to the heavy chain CDR3 of antibody B7H3 Ab1 or B7H3 Ab2, and (ii) a light chain variable region (V_{L}) that comprises light chain CDRs, which collectively contain up to 5 amino acid residue variations relative to the light chain CDRs of antibody B7H3 Ab1 or B7H3 Ab2.

4. The multi-specific antibody of claim 3, wherein the antigen binding moiety that binds B7H3 comprises (i) the V_{H} that comprises an amino acid sequence at least 80% identical to that of antibody B7H3 Ab1 or B7H3 Ab2; and (ii) the V_{L} that comprises an amino acid sequence at least 80% identical to that of antibody B7H3 Ab1 or B7H3 Ab2.

5. The multi-specific antibody of claim 4, wherein the antigen binding moiety that binds B7H3 comprises the same V_{H} and same V_{L} as antibody B7H3 Ab1 or B7H3 Ab2.

6. The multi-specific antibody of claim 1, wherein the antigen binding moieties that bind human CD40, human CD137, human Glucocorticoid-Induced TNFR-Related protein (GITR), human OX40, human CD3, human CD28, or human CD47 each comprise (i) a heavy chain variable region (V_{H}) that comprises the same heavy chain complementary determining regions (CDRs) as antibody CD40 Ab1, CD137 Ab1, GITR Ab1, OX40 Ab1, CD28 Ab1, CD28 Ab2, CD28 Ab3, CD47 Ab1, CD47 Ab2, CD3 Ab1, or CD3 Ab2; and (ii) a light chain variable region (V_{L}) that comprises the same light chain CDRs as antibody CD40 Ab1, CD137 Ab1, GITR Ab1, OX40 Ab1, CD28 Ab1, CD28 Ab2, CD28 Ab3, CD47 Ab1, CD47 Ab2, CD3 Ab1, or CD3 Ab2.

7. The multi-specific antibody of claim 1, wherein the antigen binding moieties that bind human CD40, human CD137, human Glucocorticoid-Induced TNFR-Related protein (GITR), human OX40, human CD3, human CD28, or human CD47 each comprise:
(i) a heavy chain variable region (V_{H}) that comprises heavy chain complementary determining regions (CDRs), which collectively contain up to 5 amino acid residue variations relative to the heavy chain CDR3 of antibody CD40 Ab1, CD137 Ab1, GITR Ab1, OX40 Ab1, CD28 Ab1, CD28 Ab2, CD28 Ab3, CD47 Ab1, CD47 Ab2, CD3 Ab1, or CD3 Ab2; and
(ii) a light chain variable region (V_{L}) that comprises light chain CDRs, which collectively contain up to 5 amino acid residue variations relative to the light chain CDRs of CD40 Ab1, CD137 Ab1, GITR Ab1, OX40 Ab1, CD28 Ab1, CD28 Ab2, CD28 Ab3, CD47 Ab1, CD47 Ab2, CD3 Ab1, or CD3 Ab2.

8. The multi-specific antibody of claim 7, wherein the antigen binding moieties that bind human CD40, human CD137, human Glucocorticoid-Induced TNFR-Related protein (GITR), human OX40, human CD3, human CD28, or human CD47 each comprise:
(i) the V_{H} that comprises an amino acid sequence at least 80% identical to that of antibody CD40 Ab1, CD137 Ab1, GITR Ab1, OX40 Ab1, CD28 Ab1, CD28 Ab2, CD28 Ab3, CD47 Ab1, CD47 Ab2, CD3 Ab1, or CD3 Ab2; and
(ii) the V_{L} that comprises an amino acid sequence at least 80% identical to that of antibody CD40 Ab1, CD137 Ab1, GITR Ab1, OX40 Ab1, CD28 Ab1, CD28 Ab2, CD28 Ab3, CD47 Ab1, CD47 Ab2, CD3 Ab1, or CD3 Ab2.

9. The multi-specific antibody of claim 8, wherein the antigen binding moieties that bind human CD40, human CD137, human Glucocorticoid-Induced TNFR-Related protein (GITR), human OX40, human CD3, human CD28, or human CD47 each comprise the same V_{H} and same V_{L} as antibody CD40 Ab1, CD137 Ab1, GITR Ab1, OX40 Ab1, CD28 Ab1, CD28 Ab2, CD28 Ab3, CD47 Ab1, CD47 Ab2, CD3 Ab1, or CD3 Ab2.

10. The multi-specific antibody of claim 1, which is a bi-specific antibody that comprises the first antigen binding moiety and the second antigen binding moiety.

11. The multi-specific antibody of claim 10, wherein the bi-specific antibody is of a two-chain format.

12. The multi-specific antibody of claim 11, wherein (i) the first antigen binding moiety comprises a heavy chain that comprises the first V_{H} and a heavy chain constant region or a fragment thereof and a light chain that comprises the first V_{L} and a light chain constant region; and (ii) the second antigen binding moiety is a single chain variable fragment (scFv); and wherein the scFv is linked to either the heavy chain or the light chain of (i).

13. The multi-specific antibody of claim 12, wherein the scFv is linked to the N-terminus of the heavy chain of (i) or the C-terminus of the heavy chain.

14. The multi-specific antibody of claim 12, which comprises a first polypeptide that comprises the heavy chain of (i) fused to the scFv, and a second polypeptide that comprises the light chain of (i).

15. The multi-specific antibody of claim 12, which comprises a first polypeptide that comprise the heavy chain of (i); and a second polypeptide that comprises the light chain of (i) fused to the scFv.

16. The multi-specific antibody of claim 12, wherein the first antigen binding moiety binds B7H3.

17. The multi-specific antibody of claim 14, wherein the multi-specific antibody is a multi-chain complex comprising two copies of each of the first polypeptide and the second polypeptide.

18. The multi-specific antibody of claim 10, which is of a three-chain format.

19. The multi-specific antibody of claim 18, which comprises:
(i) a first polypeptide that comprise a first heavy chain of the first antigen binding moiety, wherein the first heavy chain comprises the first V_{H} and a first heavy chain constant region or a fragment comprising the CH3 domain therein,
(ii) a second polypeptide that comprises a second heavy chain of the first antigen binding moiety and the second antigen binding moiety, which is a single chain variable fragment (scFv) comprising the second V_{H} and second V_{L}, wherein the second heavy chain comprises the first V_{H} and a second heavy chain constant region or a fragment comprising the CH3 domain therein; and
(iii) a third polypeptide that comprises a light chain of the first antigen binding moiety, which comprises the first V_{L} and a light chain constant region;
optionally wherein the first and second heavy chain constant regions comprise mutations in the CH3 domains that enhances heterodimeration over homodimeration as relative to the wild-type counterpart and/or reduces protein A binding.

20. The multi-specific antibody of claim 19, wherein in (ii), the scFv is located between the first V_{H} and the second Fc fragment or the CH3 domain thereof.

21. The multi-specific antibody of claim 19, wherein in (ii), the scFv is located at the C-terminus of the second polypeptide.

22. The multi-specific antibody of claim 18, which comprises:
(i) a first polypeptide that comprise a first heavy chain of the first antigen binding moiety and one of the second V_{H} and the second V_{L} of the second antigen binding moiety; wherein the first heavy chain comprises the first V_{H} and a first heavy chain constant region or a fragment comprising the CH3 domain therein,
(ii) a second polypeptide that comprises a second heavy chain of the first antigen binding moiety and the other one of the second V_{H} and second V_{L} of the second antigen binding moiety, wherein the second heavy chain comprises the first V_{H} and a second heavy chain constant region or a fragment comprising the CH3 domain therein; and
(iii) a third polypeptide that comprises a light chain of the first antigen binding moiety, which comprises the first V_{L} and a light chain constant region;
optionally wherein the first and second heavy chain constant regions comprise mutations in the CH3 domains that enhances heterodimeration over homodimeration as relative to the wild-type counterpart.

23. The multi-specific antibody of claim 19, wherein the first and second heavy chain constant regions comprise the mutations, which are knob-in-hole mutations, charged mutations, or ZW1 mutations.

24. The multi-specific antibody of claim 19, wherein one of the first and second heavy chain constant regions comprises a mutation that reduces protein A binding activity relative to the wild-type counterpart.

25. The multi-specific antibody of claim 10, which is of a four-chain format.

26. The multi-specific antibody of claim 25, which comprises:
(i) a first polypeptide comprising a first heavy chain of the first antigen binding moiety, the first heavy chain comprising the first V_{H} and a first heavy chain constant region or a fragment comprising the CH3 domain therein;
(ii) a second polypeptide comprising a second heavy chain of the second antigen binding moiety, the second heavy chain comprising the second V_{H}, a light chain constant region, and a second heavy chain constant fragment comprising a CH3 domain;
(iii) a third polypeptide comprising a light chain of the first antigen moiety, which comprises the first V_{L} and a light chain constant region; and
(iv) a fourth polypeptide comprising a light chain of the second antigen moiety, the light chain comprising the second V_{L} linked to a CH1 domain of a heavy chain constant region;
optionally wherein the first and second heavy chain constant regions comprise mutations in the CH3 domains that enhances heterodimeration over homodimeration as relative to the wild-type counterpart.

27. The multi-specific antibody of claim 25, which comprises:
(i) a first polypeptide comprising a first heavy chain of the first antigen binding moiety, wherein the first heavy chain comprises the first V_{H} and a first heavy chain constant region or a fragment comprising the CH3 domain therein;
(ii) a second polypeptide comprising a second heavy chain, which comprises the first V_{H}, the second antibody binding moiety that is a scFv fragment comprising the second V_{H} and the second V_{L}, and a second heavy chain constant region or a fragment comprising the CH3 domain therein;
(iii) a third polypeptide comprising a light chain of the first antigen binding moiety, which comprises the first V_{L} and a light chain constant region; and
(iv) a fourth polypeptide comprising the scFv;
optionally wherein the first and second heavy chain constant regions comprise mutations in the CH3 domains that enhances heterodimeration over homodimeration as relative to the wild-type counterpart.

28. The multi-specific antibody of claim 25, which comprises:
(i) a first polypeptide comprising a first heavy chain of the first antigen binding moiety, wherein the first heavy chain comprises the first V_{H} and a first heavy chain constant region or a fragment comprising the CH3 domain therein;
(ii) a second polypeptide comprising a light chain of the first antigen binding moiety, which comprises the first V_{L} and a light chain constant region;
(iii) a third polypeptide comprising the second V_{H}, a first TCR fragment, and a second heavy chain constant fragment comprising a CH3 domain; and
(iv) a fourth polypeptide comprising the second V_{L} and a second TCR fragment;
wherein the first and second TCR fragments collectively are a TCR alpha chain fragment and a TCR beta chain fragment, which form a dimer; and
optionally wherein the first and second heavy chain constant regions comprise mutations in the CH3 domains that enhances heterodimeration over homodimeration as relative to the wild-type counterpart.

29. The multi-specific antibody of claim 28, wherein the third polypeptide further comprises the first V_{H} linked to a CH1 domain of a heavy chain constant region.

30. The multi-specific antibody of claim 25, wherein the first and second heavy chain constant regions comprise the mutations, which are knob-in-hole mutations, charged mutations, or ZW1 mutations.

31. The multi-specific antibody of claim 25, wherein one of the first and second heavy chain constant regions comprises a mutation that reduces protein A binding activity relative to the wild-type counterpart.

32. The multi-specific antibody of claim 11, which is a bi-specific antibody comprising the first antigen binding moiety that binds B7H3 and the second antigen binding moiety that binds CD40.

33. The multi-specific antibody of claim 32, which is selected from the group consisting of Ly1581, Ly1660, Ly1661, Ly1662, Ly1663, Ly1679, Ly1935, and Ly1936.

34. The multi-specific antibody of claim 11, which is a bi-specific antibody comprising the first antigen binding moiety that binds B7H3 and the second antigen binding moiety that binds CD137.

35. The multi-specific antibody of claim 34, which is selected from the group consisting of Ly1937, Ly1938, Ly1939, Ly1940, Ly1941, Ly1942, Ly1943, and Ly1944.

36. The multi-specific antibody of claim 11, which is a bi-specific antibody comprising the first antigen binding moiety that binds B7H3 and the second antigen binding moiety that binds GITR.

37. The multi-specific antibody of claim 36, which is selected from the group consisting of Ly1945, Ly1946, Ly1947, Ly1948, Ly1049, Ly1950, Ly1951, and Ly1952.

38. The multi-specific antibody of claim 11, which is a bi-specific antibody comprising the first antigen binding moiety that binds B7H3 and the second antigen binding moiety that binds OX40.

39. The multi-specific antibody of claim 38, which is selected from the group consisting of Ly1953, Ly1954, Ly1955, Ly1956, Ly1957, Ly1958, Ly1959, and Ly1960.

40. The multi-specific antibody of claim 11, which is a bi-specific antibody comprising the first antigen binding moiety that binds B7H3 and the second antigen binding moiety that binds CD47.

41. The multi-specific antibody of claim 40, which is selected from the group consisting of Ly2043, Ly2044, Ly2045, Ly2046, Ly2047, Ly2048, Ly2049, Ly2050, Ly2051, Ly2052, Ly2053, Ly2054, Ly2055, Ly2056, Ly2057, Ly2058, Ly2059, Ly2060, Ly2061, Ly2062, Ly2063, and Ly2064.

42. The multi-specific antibody of claim 11, which is a bi-specific antibody comprising the first antigen binding moiety that binds B7H3 and the second antigen binding moiety that binds CD3.

43. The multi-specific antibody of claim 42, which is selected from the group consisting of Ly1900, Ly1901, Ly1902, Ly1903, and Ly1904.

44. The multi-specific antibody of claim 1, which is a tri-specific antibody that comprises (i) the first antigen binding moiety, (ii) the second antigen binding moiety, and (iii) the third antigen binding moiety.

45. The multi-specific antibody of claim 44, which comprises:
(i) a first polypeptide comprising a first heavy chain that comprises the first V_{H} of the first antigen binding moiety and first heavy chain constant region or a fragment comprising the CH3 domain therein;
(ii) a second polypeptide comprising the first V_{H}, a second heavy chain comprising the second V_{H} of the second antigen binding moiety and a light chain constant region, and a second heavy chain constant region or a fragment comprising the CH3 domain therein;
(iii) a third polypeptide comprising a light chain of the first antigen binding moiety, which comprises the first V_{L} and a light chain constant region; and
(iv) a fourth polypeptide comprising the second V_{L} of the second antigen binding moiety and a CH1 fragment of a heavy chain constant region;
wherein the first polypeptide, the second polypeptide or both further comprise the third antigen binding moiety, which is a single chain variable fragment (scFv);
optionally wherein the first and second heavy chain constant regions comprise mutations in the CH3 domains that enhances heterodimeration over homodimeration as relative to the wild-type counterpart.

46. The multi-specific antibody of claim 44, which comprises:
(i) a first polypeptide comprising a first heavy chain that comprises the first V_{H} of the first antigen binding moiety and a first heavy chain constant region or a fragment comprising the CH3 domain therein;
(ii) a second polypeptide comprising the first V_{H}, a second heavy chain comprising the second V_{L} of the second antigen binding moiety and a CH1 domain of a heavy chain constant region, and a second heavy chain constant region or a fragment comprising the CH3 domain therein;
(iii) a third polypeptide comprising a light chain of the first antigen binding moiety; and
(iv) a fourth polypeptide comprising the second V_{H} of the second antigen binding moiety and a light chain constant region;
wherein the first polypeptide, the second polypeptide or both further comprise the third antigen binding moiety, which is a single chain variable fragment (scFv); and
optionally wherein the first and second heavy chain constant regions comprise mutations in the CH3 domains that enhances heterodimeration over homodimeration as relative to the wild-type counterpart.

47. The multi-specific antibody of claim 44, which comprises:
(i) a first polypeptide comprising a first heavy chain that comprises the first V_{H} of the first antigen binding moiety, first heavy chain constant region or a fragment comprising the CH3 domain therein, and one of the third V_{H} and third V_{L} of the third antigen binding moiety;
(ii) a second polypeptide comprising the first V_{H}, a second heavy chain comprising the second V_{H} of the second antigen binding moiety and a light chain constant region, a second heavy chain constant region or a fragment comprising the CH3 domain therein, and the other one of the third V_{H} and third V_{L};
(iii) a third polypeptide comprising a light chain of the first antigen binding moiety, which comprises the first V_{L} and a light chain constant region; and
(iv) a fourth polypeptide comprising the second V_{L} of the second antigen binding moiety and a CH1 domain of a heavy chain constant region;
optionally wherein the first and second heavy chain constant regions comprise mutations in the CH3 domains that enhances heterodimeration over homodimeration as relative to the wild-type counterpart.

48. The multi-specific antibody of claim 44, which comprises:
(i) a first polypeptide comprising a first heavy chain that comprises the first V_{H} of the first antigen binding moiety, a first heavy chain constant region or a fragment comprising the CH3 domain therein, and one of the third V_{H} and third V_{L} of the third antigen binding moiety;
(ii) a second polypeptide comprising the first V_{H}, a second heavy chain comprising the second V_{L} of the second antigen binding moiety and a CH1 domain of a heavy chain constant region, a second heavy chain constant region or a fragment comprising the CH3 domain therein, and the other one of the third V_{H} and third V_{L};
(iii) a third polypeptide comprising a light chain of the first antigen binding moiety, which comprises the first V_{L} and a light chain constant region; and
(iv) a fourth polypeptide comprising the second V_{H} of the second antigen binding moiety and a light chain constant region;
optionally wherein the first and second heavy chain constant regions comprise mutations in the CH3 domains that enhances heterodimeration over homodimeration as relative to the wild-type counterpart.

49. The multi-specific antibody of claim 44, which comprises:
(i) a first polypeptide comprising a first heavy chain that comprises the first V_{H} of the first antigen binding moiety and a first heavy chain constant region or a fragment comprising the CH3 domain therein;
(ii) a second polypeptide comprising the first V_{H}, the second antigen binding moiety, which is a scFv, and a second heavy chain constant region or a fragment comprising the CH3 domain therein; and
(iii) a third polypeptide comprising a light chain of the first antigen binding moiety, which comprises the first V_{L} and a light chain constant region;
wherein the first polypeptide, the second polypeptide, or both further comprise the third antigen binding moiety, which is a scFv; and
optionally wherein the first and second heavy chain constant regions comprise mutations in the CH3 domains that enhances heterodimeration over homodimeration as relative to the wild-type counterpart.

50. The multi-specific antibody of claim 44, which comprises:
(i) a first polypeptide comprising a first heavy chain that comprises the first V_{H} of the first antigen binding moiety, one of the second V_{H} and second V_{L} of the second antigen binding moiety, and a first heavy chain constant region or a fragment comprising the CH3 domain therein;
(ii) a second polypeptide comprising the first V_{H}, the other one of the second V_{H} and second V_{L}, and a second heavy chain constant region or a fragment comprising the CH3 domain therein; and
(iii) a third polypeptide comprising a light chain of the first antigen binding moiety, which comprises the first V_{L} and a light chain constant region;
wherein the first polypeptide, the second polypeptide, or both further comprise the third antigen binding moiety, which is a scFv, or wherein the third polypeptide further comprises the third antigen binding moiety; and
optionally wherein the first and second heavy chain constant regions comprise mutations in the CH3 domains that enhances heterodimeration over homodimeration as relative to the wild-type counterpart.

51. The multi-specific antibody of claim 44, which comprises:
(i) a first polypeptide comprising a first heavy chain that comprises the first V_{H} of the first antigen binding moiety, one of the second V_{H} and second V_{L} of the second antigen binding moiety, a first heavy chain constant region or a fragment comprising the CH3 domain therein, and one of the third V_{H} and third V_{L} of the third antigen binding moiety;
(ii) a second polypeptide comprising the first V_{H}, the other one of the second V_{H} and second V_{L}, and a second heavy chain constant region or a fragment comprising the CH3 domain therein, and the other one of the third V_{H} and third V_{L}; and
(iii) a third polypeptide comprising a light chain of the first antigen binding moiety, which comprises the first V_{L} and a light chain constant region;
optionally wherein the first and second heavy chain constant regions comprise mutations in the CH3 domains that enhances heterodimeration over homodimeration as relative to the wild-type counterpart.

52. The multi-specific antibody of claim 44, which comprises:
(i) a first polypeptide comprising a first heavy chain that comprises the first V_{H} of the first antigen binding moiety, a first heavy chain constant region or a fragment comprising the CH3 domain therein, and the second antigen binding moiety, which is a scFv;
(ii) a second polypeptide comprising the first V_{H}, a second heavy chain constant region or a fragment comprising the CH3 domain therein, and the third antigen binding moiety, which is a scFv; and
(iii) a third polypeptide comprising a light chain of the first antigen binding moiety, which comprises the first V_{L} and a light chain constant region;
optionally wherein the first and second heavy chain constant regions comprise mutations in the CH3 domains that enhances heterodimeration over homodimeration as relative to the wild-type counterpart.

53. The multi-specific antibody of claim 44, which comprises:
(i) a first polypeptide comprising a first heavy chain that comprises the first V_{H} of the first antigen binding moiety and a first heavy chain constant region or a fragment comprising the CH3 domain therein;
(ii) a second polypeptide comprising a second heavy chain that comprises the second V_{H} of the second antigen binding moiety and one of the third V_{H} and third V_{L} of the third antigen binding moiety, wherein the third V_{H} is fused with a light chain constant region or the third V_{L} is fused with a CH1 domain of a heavy chain constant region;
(iii) a third polypeptide comprising a light chain of the second antigen binding moiety, which comprises the second V_{L} and a light chain constant region, and the other one of the third V_{H} and third V_{L} of the third antigen binding moiety, wherein the third V_{H} is fused with a light chain constant region or the third V_{L} is fused with a CH1 domain of a heavy chain constant region; and
(iv) a fourth polypeptide comprising a light chain of the first antigen binding moiety, which comprises the first V_{L} and a light chain constant region;
wherein either the second polypeptide or the third polypeptide further comprise a second heavy chain constant region or a fragment comprising the CH3 domain therein; and
optionally wherein the first and second heavy chain constant regions comprise mutations in the CH3 domains that enhances heterodimeration over homodimeration as relative to the wild-type counterpart.

54. The multi-specific antibody of claim 44, which comprises:
(i) a first polypeptide comprising the first V_{H} of the first antigen binding moiety, the second V_{H} of the second antigen binding moiety, and a first heavy chain constant region or a fragment comprising the CH3 domain therein;
(ii) a second polypeptide comprising the third V_{H} of the third antigen binding moiety and a light chain constant domain;
(iii) a third polypeptide comprising the third V_{L} of the third antigen binding moiety and a CH1 domain of a heavy chain constant region; and
(iv) a fourth polypeptide comprising a light chain of the first antigen binding moiety, which comprises the first V_{L} and a light chain constant region;
wherein either the second polypeptide or the third polypeptide further comprise the second V_{L} of the second antigen binding moiety and a second heavy chain constant region or a fragment comprising the CH3 domain therein; and
optionally wherein the first and second heavy chain constant regions comprise mutations in the CH3 domains that enhances heterodimeration over homodimeration as relative to the wild-type counterpart.

55. The multi-specific antibody of claim 44, which comprises:
(i) a first polypeptide comprising the first V_{H} of the first antigen binding moiety, the second V_{L} of the second antigen binding moiety, and a first heavy chain constant region or a fragment comprising the CH3 domain therein;
(ii) a second polypeptide comprising the third V_{H} of the third antigen binding moiety and a light chain constant domain;
(iii) a third polypeptide comprising the third V_{L} of the third antigen binding moiety and a CH1 domain of a heavy chain constant region; and
(iv) a fourth polypeptide comprising a light chain of the first antigen binding moiety, which comprises the first V_{L} and a light chain constant region;
wherein either the second polypeptide or the third polypeptide further comprise the second V_{H} of the second antigen binding moiety and a second heavy chain constant region or a fragment comprising the CH3 domain therein;
optionally wherein the first and second heavy chain constant regions comprise mutations in the CH3 domains that enhances heterodimeration over homodimeration as relative to the wild-type counterpart.

56. The multi-specific antibody of claim 54, wherein either the second polypeptide or the third polypeptide further comprises the first V_{H} fused to a CH1 of a heavy chain constant region.

57. The multi-specific antibody of claim 44, which comprises:
(i) a first polypeptide comprising a heavy chain of the 1^{st} antigen binding moiety and the second antigen binding moiety, wherein the heavy chain of the 1^{st} antigen binding moiety comprises the first V_{H} and a heavy chain constant region, and wherein the second antigen binding moiety is an scFv fragment; and
(ii) a second polypeptide comprising a light chain of the 1^{st} antigen binding moiety and the third antigen binding moiety, wherein the light chain comprises the first V_{L} and a light chain constant region, and wherein the third antigen binding moiety is an scFv fragment.

58. The multi-specific antibody of claim 44, which comprises:
(i) a first polypeptide comprising a heavy chain of the 1^{st} antigen binding moiety and the second antigen binding moiety, wherein the heavy chain of the 1^{st} antigen binding moiety comprises the first V_{H} and a first heavy chain constant region, and wherein the second antigen binding moiety is an scFv fragment; and
(ii) a second polypeptide comprising a heavy chain of the 1^{st} antigen binding moiety and the third antigen binding moiety, wherein the heavy chain comprises the first V_{H} and a second heavy chain constant region, and wherein the third antigen binding moiety is an scFv fragment; and
(iii) a third polypeptide comprising a light chain of the first antigen binding moiety, the light chain comprising the first V_{L} and a light chain constant region;
optionally wherein the first and second heavy chain constant regions comprise mutations in the CH3 domains that enhances heterodimeration over homodimeration as relative to the wild-type counterpart.

59. The multi-specific antibody of claim 45, wherein the first and second heavy chain constant regions comprise the mutations, which are knob-in-hole mutations, charged mutations, or ZW1 mutations.

60. The multi-specific antibody of claim 45, wherein one of the first and second heavy chain constant regions comprises a mutation that reduces protein A binding activity relative to the wild-type counterpart.

61. The multi-specific antibody of claim 44, which is a tri-specific antibody comprising (i) the first antigen binding moiety, (ii) the second antigen binding moiety, and (iii) the third antigen binding moiety, wherein (i)-(iii) bind B7H3, CD3, and CD137.

62. The multi-specific antibody of claim 61, which is selected from the group consisting of Ly1785, Ly1793, Ly1794, Ly1795, Ly1796, Ly1797, Ly1798, Ly1799, Ly1800, Ly1801, Ly1802, Ly1803, Ly1804, Ly1805, and Ly1849.

63. The multi-specific antibody of claim 44, which is a tri-specific antibody comprising (i) the first antigen binding moiety, (ii) the second antigen binding moiety, and (iii) the third antigen binding moiety, wherein (i)-(iii) bind B7H3, CD3, and GITR.

64. The multi-specific antibody of claim 63, which is selected from the group consisting of Ly1905, Ly1906, Ly1907, Ly1908, Ly1909, Ly1910, Ly1911, Ly1912, Ly1913, Ly1914, Ly1915, Ly1916, Ly1917, Ly1918, and Ly1933.

65. The multi-specific antibody of claim 44, which is a tri-specific antibody comprising (i) the first antigen binding moiety, (ii) the second antigen binding moiety, and (iii) the third antigen binding moiety, wherein (i)-(iii) bind B7H3, CD3, and OX40.

66. The multi-specific antibody of claim 65, which is selected from the group consisting of Ly1919, Ly1920, Ly1921, Ly1922, Ly1923, Ly1924, Ly1925, Ly1926, Ly1927, Ly1928, Ly1929, Ly1930, Ly1931, Ly1932, and Ly1934.

67. The multi-specific antibody of claim 44, which is a tri-specific antibody comprising (i) the first antigen binding moiety, (ii) the second antigen binding moiety, and (iii) the third antigen binding moiety, wherein (i)-(iii) bind B7H3, CD3, and CD28.

68. The multi-specific antibody of claim 67, which is selected from the group consisting of Ly1968-Ly2042.

69. The multi-specific antibody of claim 44, which is a tri-specific antibody comprising (i) the first antigen binding moiety, (ii) the second antigen binding moiety, and (iii) the third antigen binding moiety, wherein (i)-(iii) bind B7H3, CD137, and OX40.

70. The multi-specific antibody of claim 69, which is Ly2076, Ly2077, or Ly2078.

71. The multi-specific antibody of claim 44, which is a tri-specific antibody comprising (i) the first antigen binding moiety, (ii) the second antigen binding moiety, and (iii) the third antigen binding moiety, wherein (i)-(iii) bind B7H3, CD137, and GITR.

72. The multi-specific antibody of claim 71, which is Ly2079, Ly2080, or Ly2081.

73. A humanized antibody specific to human B7H3, wherein the humanized antibody comprises a heavy chain variable region (V_{H}) and a light chain variable region (V_{L}), wherein:
(i) the V_{H} comprises a framework of IGHV1-46*01 and heavy chain complementary determining regions (CDRs) 1, 2, and 3, which are either identical to those of parent murine antibody Ly383 or collectively contain no more than 5 amino acid residue variations relative to the parent murine antibody Ly383; or
(ii) the V_{H} comprises a framework of IGHV1-2*02 and heavy chain CDRs 1, 2, and 3, which are either identical to those of parent murine antibody Ly387 or collectively contain no more than 5 amino acid residue variations relative to the parent murine antibody Ly387.

74. The humanized antibody of claim 73, wherein the V_{L} comprises a framework of IGKV3-11*01 and light chain CDRs 1, 2, and 3, which are either identical to those of the parent murine antibody Ly383 or Ly387 or collectively contain no more than 5 amino acid residue variations relative to the parent murine antibody Ly383 or Ly387.

75. The humanized antibody of claim 73, wherein the antibody comprises the same heavy chain CDRs 1, 2, and 3 as antibody Ly383, and/or the same light chain CDRs 1, 2, and 3 and antibody Ly383.

76. The humanized antibody of claim 73, wherein the antibody comprises the same heavy chain CDRs 1, 2, and 3 as antibody Ly387, and/or the same light chain CDRs 1, 2, and 3 and antibody Ly387.

77. The humanized antibody of claim 75, wherein the V_{H} comprises one or more mutations in the V_{H} framework.

78. The humanized antibody of claim 77, wherein the mutations in the V_{H} framework are back mutations based on amino acid residues in the parent murine antibody at corresponding positions.

79. The humanized antibody of claim 73, wherein the V_{H} comprises the amino acid sequence of SEQ ID NO: 35, 39, 47, or 49; and/or wherein the V_{L} comprises the amino acid sequence of SEQ ID NO: 37 or 41.

80. The humanized antibody of claim 73, wherein the V_{H} comprises the amino acid sequence of SEQ ID NO: 43; and/or wherein the V_{L} comprises the amino acid sequence of SEQ ID NO: 45.

81. The humanized antibody of claim 73, wherein the antibody is a full-length antibody.

82. The humanized antibody of claim 81, wherein the full-length antibody is an IgG/kappa molecule.

83. The humanized antibody of claim 82, wherein the full-length antibody comprises a heavy chain that is an IgG1, IgG2, or IgG4 chain.

84. The humanized antibody of claim 83, wherein the heavy chain comprises a mutated Fc region, which exhibits altered binding affinity or selectivity to an Fc receptor as relative to the wild-type counterpart.

85. The humanized antibody of claim 73, wherein the antibody is selected from the group consisting of Ly1426, Ly1562, Ly1612, Ly1614, Ly1616, Ly1618, and Ly1442.

86. A nucleic acid or a nucleic acid set, which collectively encodes an antibody of any one of the preceding claims.

87. The nucleic acid or nucleic acid set of claim 86, which is an expression vector or an expression vector set.

88. A host cell, comprising the nucleic acid or nucleic acid set of claim 86.

89. The host cell of claim 88, which is a mammalian host cell.

90. A method for producing an antibody set forth in claim 1:
(i) culturing the host cell of comprising a nucleic acid(s) encoding the antibody under conditions allowing for expression of the antibody; and
(ii) harvesting the antibody thus produced.

91. A pharmaceutical composition comprising an antibody of claim 1 and a pharmaceutically acceptable carrier.

92. A method for modulating immune responses, comprising administering an effective amount of claim 1 or the pharmaceutical composition thereof to a subject in need thereof.

93. The method of claim 92, wherein the subject is a human patient having or suspected of having cancer.

The application's sequence listing, which the Patent Office published only in electronic form, follows.

SEQUENCE LISTING (671 sequences)

SEQ ID NO: 1 - protein, 121 aa, Artificial Sequence
  Synthetic
QVQLVQSGAEVKKPGASVKVSCKASGYTFTSYVMHWVRQKPGQGLEWIGYINPYNEGTESTDKFKGRATMTSDKSTSTVYMELSSLRSEDTAVYYCASIYYGYEGTYFGVWGQGTLVTVSS

SEQ ID NO: 2 - protein, 106 aa, Artificial Sequence
  Synthetic
EIVLTQSPATLSLSPGERATLSCRASSSVSYMHWYQQKPGQAPRPWIYATSNLASGIPARFSGSRSGTDYTLTISSLEPEDFAVYYCQQWSSNTLTFGGGTKVEIK

SEQ ID NO: 3 - protein, 117 aa, Artificial Sequence
  Synthetic
QVQLVQSGAEVKKPGASVKVSCKASGYTFTSYWMHWVRQAPGQGLEWMGMIHPNSGGTNYNEKFKGRVTMTRDTSISTAYMELSRLRSDDTAVYYCARSQATWFAYWGQGTLVTVSS

SEQ ID NO: 4 - protein, 108 aa, Artificial Sequence
  Synthetic
EIVLTQSPATLSLSPGERATLSCRASSSVSSSYLHWYQQKPGQAPRLLIYSTSNLASGIPARFSGSGSGTDFTLTISSLEPEDFAVYYCQHYSGYPLTFGGGTKVEIK

SEQ ID NO: 5 - protein, 126 aa, Artificial Sequence
  Synthetic
QVQLVQSGAEVKKPGASVKVSCKASGYTFTGYYMHWVRQAPGQGLEWMGWINPDSGGTNYAQKFQGRVTMTRDTSISTAYMELNRLRSDDTAVYYCARDQPLGYCTNGVCSYFDYWGQGTLVTVSS

SEQ ID NO: 6 - protein, 107 aa, Artificial Sequence
  Synthetic
DIQMTQSPSSVSASVGDRVTITCRASQGIYSWLAWYQQKPGKAPNLLIYTASTLQSGVPSRFSGSGSGTDFTLTISSLQPEDFATYYCQQANIFPLTFGGGTKVEIK

SEQ ID NO: 7 - protein, 116 aa, Artificial Sequence
  Synthetic
QVQLVQSGAEVKKPGASVKVSCKASGYTFAGFEMHWVRQAPGQGLEWMGAIDPKTGGTDYNQKFKDRVTMTRDTSISTAYMELSRLRSDDTAVYYCARDLGYFDVWGQGTLVTVSS

SEQ ID NO: 8 - protein, 107 aa, Artificial Sequence
  Synthetic
DIQMTQSPSSLSASVGDRVTITCRASQDIRSNLNWYQQKPGGAVKLLIYYTSRLHSGVPSRFSGSGSGTDYTLTISSLQPEDFATYFCQQSEKLPRTFGGGTKVEIR

SEQ ID NO: 9 - protein, 121 aa, Artificial Sequence
  Synthetic
QVQLQESGPGLVKPSETLSLTCTVSGFSLTSYNVHWIRQPPGKGLEWIGVIWSGVRTDYNSVLKPRVTISVDTSKNQFSLKLSSVTAADTAVYYCARGTYDDNYHDVMDAWGQGTLVTVSS

SEQ ID NO: 10 - protein, 106 aa, Artificial Sequence
  Synthetic
EIVLTQSPATLSLSPGERATLSCRASKSVRTGMHWYQQKPGQAPRLLIYGASNLESGIPARFSGSGSGTDFTLTISSLEPEDFAVYYCQQSWNHFTFGQGTKLEIK

SEQ ID NO: 11 - protein, 117 aa, Artificial Sequence
  Synthetic
EVQLVQSGAEVKKPGASVKVSCKASGYTFTDSYMSWVRQAPGQGLEWIGDMYPDNGDSSYNQKFRERVTITRDTSTSTAYLELSSLRSEDTAVYYCVLAPRWYFSVWGQGTLVTVSS

SEQ ID NO: 12 - protein, 107 aa, Artificial Sequence
  Synthetic
DIQMTQSPSSLSASVGDRVTITCRASQDISNYLNWYQQKPGKAPKLLIYYTSRLRSGVPSRFSGSGSGTDFTLTISSLQPEDFATYYCQQGHTLPPTFGQGTKVEIK

SEQ ID NO: 13 - protein, 120 aa, Artificial Sequence
  Synthetic
QVQLVQSGAEVVKPGASVKVSCKASGYTFTSYYIHWVRQAPGQGLEWIGSIYPGNVNTNYAQKFQGRATLTVDTSISTAYMELSRLRSDDTAVYYCTRSHYGLDWNFDVWGKGTTVTVSS

SEQ ID NO: 14 - protein, 107 aa, Artificial Sequence
  Synthetic
DIQMTQSPSSLSASVGDRVTITCQASQNIYVWLNWYQQKPGKAPKLLIYKASNLHTGVPSRFSGSGSGTDFTLTISSLQPEDIATYYCQQGQTYPYTFGQGTKLEIK

SEQ ID NO: 15 - protein, 120 aa, Artificial Sequence
  Synthetic
QVQLVQSGAEVKKPGASVKVSCKASGYTFTSYYIHWVRQAPGQGLEWIGCIYPGNVNTNYNEKFKDRATLTVDTSISTAYMELSRLRSDDTAVYFCTRSHYGLDWNFDVWGQGTTVTVSS

SEQ ID NO: 16 - protein, 107 aa, Artificial Sequence
  Synthetic
DIQMTQSPSSLSASVGDRVTITCHASQNIYVWLNWYQQKPGKAPKLLIYKASNLHTGVPSRFSGSGSGTDFTLTISSLQPEDFATYYCQQGQTYPYTFGGGTKVEIK

SEQ ID NO: 17 - protein, 122 aa, Artificial Sequence
  Synthetic
QVQLQESGPGLVKPSETLSLTCTVSGGSISSYYWSWIRQPPGKGLEWIGYIYYSGITHYNPSLKSRVTISVDTSKIQFSLKLSSVTAADTAVYYCARWGVRRDYYYYGMDVWGQGTTVTVSS

SEQ ID NO: 18 - protein, 108 aa, Artificial Sequence
  Synthetic
EIVLTQSPGTLSLSPGERATLSCRASQSVSSSYLAWYQQKPGQAPRLLIYGASSRATGIPDRFSGSGSGTDFTLTISRLEPEDFAVYYCQQYGSSPWTFGQGTKVEIK

SEQ ID NO: 19 - protein, 117 aa, Artificial Sequence
  Synthetic
QVQLVQSGAEVKKPGASVKVSCKASGYTFTNYNMHWVRQAPGQRLEWMGTIYPGNDDTSYNQKFKDRVTITADTSASTAYMELSSLRSEDTAVYYCARGGYRAMDYWGQGTLVTVSS

SEQ ID NO: 20 - protein, 112 aa, Artificial Sequence
  Synthetic
DIVMTQSPLSLPVTPGEPASISCRSSQSIVYSNGNTYLGWYLQKPGQSPQLLIYKVSNRFSGVPDRFSGSGSGTDFTLKISRVEAEDVGVYYCFQGSHVPYTFGQGTKLEIK

SEQ ID NO: 21 - protein, 118 aa, Artificial Sequence
  Synthetic
KVQLVESGGGLVKPGGSLRLSCAASGFTFSNAWMNWVRQAPGKGLEWVGRIKRKTDGETTDYAAPVKGRFSISRDDSKNTLYLQMNSLKTEDTAVYYCAGSNRAFDIWGQGTMVTVSA

SEQ ID NO: 22 - protein, 113 aa, Artificial Sequence
  Synthetic
DIVMTQSPDSLAVSLGERATINCKSSQSVLYSSNNRNYLAWYQQKPGQPPKLLINQASTRASGVPDRFSGSGSGTEFTLIISSLHAEDVAIYYCQQYYTPPLAFGGGTKLEIK

SEQ ID NO: 23 - protein, 125 aa, Artificial Sequence
  Synthetic
EVQLVESGGGLVQPGGSLRLSCAASGFTFSTYAMNWVRQAPGKGLEWVGRIRSKYNNYATYYADSVKGRFTISRDDSKNSLYLQMNSLKTEDTAVYYCVRHGNFGNSYVSWFAYWGQGTLVTVSS

SEQ ID NO: 24 - protein, 109 aa, Artificial Sequence
  Synthetic
QAVVTQEPSLTVSPGGTVTLTCRSSTGAVTTSNYANWVQQKPGQAPRGLIGGTNKRAPWTPARFSGSLLGGKAALTITGAQAEDEADYYCALWYSNLWVFGGGTKLTVL

SEQ ID NO: 25 - protein, 119 aa, Artificial Sequence
  Synthetic
QVQLVQSGAEVKKPGASVKVSCKASGYTFTRYTMHWVRQAPGQGLEWMGYINPSRGYTNYNQKFKDRVTMTRDTSTSTVYMELSSLRSEDTAVYYCARYYDDHYCLDYWGQGTLVTVSS

SEQ ID NO: 26 - protein, 106 aa, Artificial Sequence
  Synthetic
DIQMTQSPSTLSASVGDRVTITCSASSSVSYMNWYQQKPGKAPKLLIYDTSKLASGVPSRFSGSGSGTEFTLTISSLQPDDFATYYCQQWSSNPFTFGQGTKLEIK

SEQ ID NO: 27 - protein, 121 aa, Artificial Sequence
  Synthetic
EVQLQQSGPELVKPGASVKMSCKASGYTFTSYVMHWVKQKPGQGLEWIGYINPYNDGTECTDKFKGKATLTSDKSSSTAYMELSSLTSEDSAVYYCASIYYGYDGTYFGVWGAGTSVTVSS

SEQ ID NO: 28 - protein, 451 aa, Artificial Sequence
  Synthetic
EVQLQQSGPELVKPGASVKMSCKASGYTFTSYVMHWVKQKPGQGLEWIGYINPYNDGTECTDKFKGKATLTSDKSSSTAYMELSSLTSEDSAVYYCASIYYGYDGTYFGVWGAGTSVTVSSASTKGPSVFPLAPSSKSTSGGTAALGCLVKDYFPEPVTVSWNSGALTSGVHTFPAVLQSSGLYSLSSVVTVPSSSLGTQTYICNVNHKPSNTKVDKKVEPKSCDKTHTCPPCPAPELLGGPSVFLFPPKPKDTLMISRTPEVTCVVVDVSHEDPEVKFNWYVDGVEVHNAKTKPREEQYNSTYRVVSVLTVLHQDWLNGKEYKCKVSNKALPAPIEKTISKAKGQPREPQVYTLPPSREEMTKNQVSLTCLVKGFYPSDIAVEWESNGQPENNYKTTPPVLDSDGSFFLYSKLTVDKSRWQQGNVFSCSVMHEALHNHYTQKSLSLSPGK

SEQ ID NO: 29 - protein, 106 aa, Artificial Sequence
  Synthetic
QIVLSQSPAILSTSPGEKVTMTCRASSSVSYMHWYQQKPGSSPKPWIYATSNLASGVPARFSGSRSGTSYSLTISRVEAEDAATYYCQQWSSNTLTFGGGTKLELK

SEQ ID NO: 30 - protein, 213 aa, Artificial Sequence
  Synthetic
QIVLSQSPAILSTSPGEKVTMTCRASSSVSYMHWYQQKPGSSPKPWIYATSNLASGVPARFSGSRSGTSYSLTISRVEAEDAATYYCQQWSSNTLTFGGGTKLELKRTVAAPSVFIFPPSDEQLKSGTASVVCLLNNFYPREAKVQWKVDNALQSGNSQESVTEQDSKDSTYSLSSTLTLSKADYEKHKVYACEVTHQGLSSPVTKSFNRGEC

SEQ ID NO: 31 - protein, 117 aa, Artificial Sequence
  Synthetic
QVQLQQPGAELVKPGASVKLSCKASGYTFTSYWMHWVKQRPGQGLEWIGMIHPNSGGTNYNEKFKGKGTLTVDKSSSTAYMQLSSLTSDDSAVYYCVTSQATWFAYWGQGTLVTVSA

SEQ ID NO: 32 - protein, 447 aa, Artificial Sequence
  Synthetic
QVQLQQPGAELVKPGASVKLSCKASGYTFTSYWMHWVKQRPGQGLEWIGMIHPNSGGTNYNEKFKGKGTLTVDKSSSTAYMQLSSLTSDDSAVYYCVTSQATWFAYWGQGTLVTVSAASTKGPSVFPLAPSSKSTSGGTAALGCLVKDYFPEPVTVSWNSGALTSGVHTFPAVLQSSGLYSLSSVVTVPSSSLGTQTYICNVNHKPSNTKVDKKVEPKSCDKTHTCPPCPAPELLGGPSVFLFPPKPKDTLMISRTPEVTCVVVDVSHEDPEVKFNWYVDGVEVHNAKTKPREEQYNSTYRVVSVLTVLHQDWLNGKEYKCKVSNKALPAPIEKTISKAKGQPREPQVYTLPPSREEMTKNQVSLTCLVKGFYPSDIAVEWESNGQPENNYKTTPPVLDSDGSFFLYSKLTVDKSRWQQGNVFSCSVMHEALHNHYTQKSLSLSPGK

SEQ ID NO: 33 - protein, 108 aa, Artificial Sequence
  Synthetic
ENVLTQSPAIMSVSPGEKVTMTCRASSSVSSSYLHWYQQKSGASPKFWIYSTSNLASGVPARFSGSGSGTSYSLTISSVEAEDAATYYCQHYSGYPLTFGAGTKLELR

SEQ ID NO: 34 - protein, 215 aa, Artificial Sequence
  Synthetic
ENVLTQSPAIMSVSPGEKVTMTCRASSSVSSSYLHWYQQKSGASPKFWIYSTSNLASGVPARFSGSGSGTSYSLTISSVEAEDAATYYCQHYSGYPLTFGAGTKLELRRTVAAPSVFIFPPSDEQLKSGTASVVCLLNNFYPREAKVQWKVDNALQSGNSQESVTEQDSKDSTYSLSSTLTLSKADYEKHKVYACEVTHQGLSSPVTKSFNRGEC

SEQ ID NO: 35 - protein, 121 aa, Artificial Sequence
  Synthetic
QVQLVQSGAEVKKPGASVKVSCKASGYTFTSYVMHWVRQAPGQGLEWMGYINPYNDGTECTDKFKGRVTMTRDTSTSTVYMELSSLRSEDTAVYYCARIYYGYDGTYFGVWGQGTLVTVSS

SEQ ID NO: 36 - protein, 451 aa, Artificial Sequence
  Synthetic
QVQLVQSGAEVKKPGASVKVSCKASGYTFTSYVMHWVRQAPGQGLEWMGYINPYNDGTECTDKFKGRVTMTRDTSTSTVYMELSSLRSEDTAVYYCARIYYGYDGTYFGVWGQGTLVTVSSASTKGPSVFPLAPSSKSTSGGTAALGCLVKDYFPEPVTVSWNSGALTSGVHTFPAVLQSSGLYSLSSVVTVPSSSLGTQTYICNVNHKPSNTKVDKKVEPKSCDKTHTCPPCPAPELLGGPSVFLFPPKPKDTLMISRTPEVTCVVVDVSHEDPEVKFNWYVDGVEVHNAKTKPREEQYNSTYRVVSVLTVLHQDWLNGKEYKCKVSNKALPAPIEKTISKAKGQPREPQVYTLPPSREEMTKNQVSLTCLVKGFYPSDIAVEWESNGQPENNYKTTPPVLDSDGSFFLYSKLTVDKSRWQQGNVFSCSVMHEALHNHYTQKSLSLSPGK

SEQ ID NO: 37 - protein, 106 aa, Artificial Sequence
  Synthetic
EIVLTQSPATLSLSPGERATLSCRASSSVSYMHWYQQKPGQAPRLLIYATSNLASGIPARFSGSGSGTDFTLTISSLEPEDFAVYYCQQWSSNTLTFGGGTKVEIK

SEQ ID NO: 38 - protein, 213 aa, Artificial Sequence
  Synthetic
EIVLTQSPATLSLSPGERATLSCRASSSVSYMHWYQQKPGQAPRLLIYATSNLASGIPARFSGSGSGTDFTLTISSLEPEDFAVYYCQQWSSNTLTFGGGTKVEIKRTVAAPSVFIFPPSDEQLKSGTASVVCLLNNFYPREAKVQWKVDNALQSGNSQESVTEQDSKDSTYSLSSTLTLSKADYEKHKVYACEVTHQGLSSPVTKSFNRGEC

SEQ ID NO: 39 - protein, 121 aa, Artificial Sequence
  Synthetic
QVQLVQSGAEVKKPGASVKVSCKASGYTFTSYVMHWVRQKPGQGLEWIGYINPYNDGTECTDKFKGRATMTSDKSTSTVYMELSSLRSEDTAVYYCASIYYGYDGTYFGVWGQGTLVTVSS

SEQ ID NO: 40 - protein, 451 aa, Artificial Sequence
  Synthetic
QVQLVQSGAEVKKPGASVKVSCKASGYTFTSYVMHWVRQKPGQGLEWIGYINPYNDGTECTDKFKGRATMTSDKSTSTVYMELSSLRSEDTAVYYCASIYYGYDGTYFGVWGQGTLVTVSSASTKGPSVFPLAPSSKSTSGGTAALGCLVKDYFPEPVTVSWNSGALTSGVHTFPAVLQSSGLYSLSSVVTVPSSSLGTQTYICNVNHKPSNTKVDKKVEPKSCDKTHTCPPCPAPELLGGPSVFLFPPKPKDTLMISRTPEVTCVVVDVSHEDPEVKFNWYVDGVEVHNAKTKPREEQYNSTYRVVSVLTVLHQDWLNGKEYKCKVSNKALPAPIEKTISKAKGQPREPQVYTLPPSREEMTKNQVSLTCLVKGFYPSDIAVEWESNGQPENNYKTTPPVLDSDGSFFLYSKLTVDKSRWQQGNVFSCSVMHEALHNHYTQKSLSLSPGK

SEQ ID NO: 41 - protein, 106 aa, Artificial Sequence; identical to SEQ ID NO: 2
  Synthetic

SEQ ID NO: 42 - protein, 213 aa, Artificial Sequence
  Synthetic
EIVLTQSPATLSLSPGERATLSCRASSSVSYMHWYQQKPGQAPRPWIYATSNLASGIPARFSGSRSGTDYTLTISSLEPEDFAVYYCQQWSSNTLTFGGGTKVEIKRTVAAPSVFIFPPSDEQLKSGTASVVCLLNNFYPREAKVQWKVDNALQSGNSQESVTEQDSKDSTYSLSSTLTLSKADYEKHKVYACEVTHQGLSSPVTKSFNRGEC

SEQ ID NO: 43 - protein, 117 aa, Artificial Sequence; identical to SEQ ID NO: 3
  Synthetic

SEQ ID NO: 44 - protein, 447 aa, Artificial Sequence
  Synthetic
QVQLVQSGAEVKKPGASVKVSCKASGYTFTSYWMHWVRQAPGQGLEWMGMIHPNSGGTNYNEKFKGRVTMTRDTSISTAYMELSRLRSDDTAVYYCARSQATWFAYWGQGTLVTVSSASTKGPSVFPLAPSSKSTSGGTAALGCLVKDYFPEPVTVSWNSGALTSGVHTFPAVLQSSGLYSLSSVVTVPSSSLGTQTYICNVNHKPSNTKVDKKVEPKSCDKTHTCPPCPAPELLGGPSVFLFPPKPKDTLMISRTPEVTCVVVDVSHEDPEVKFNWYVDGVEVHNAKTKPREEQYNSTYRVVSVLTVLHQDWLNGKEYKCKVSNKALPAPIEKTISKAKGQPREPQVYTLPPSREEMTKNQVSLTCLVKGFYPSDIAVEWESNGQPENNYKTTPPVLDSDGSFFLYSKLTVDKSRWQQGNVFSCSVMHEALHNHYTQKSLSLSPGK

SEQ ID NO: 45 - protein, 108 aa, Artificial Sequence; identical to SEQ ID NO: 4
  Synthetic

SEQ ID NO: 46 - protein, 215 aa, Artificial Sequence
  Synthetic
EIVLTQSPATLSLSPGERATLSCRASSSVSSSYLHWYQQKPGQAPRLLIYSTSNLASGIPARFSGSGSGTDFTLTISSLEPEDFAVYYCQHYSGYPLTFGGGTKVEIKRTVAAPSVFIFPPSDEQLKSGTASVVCLLNNFYPREAKVQWKVDNALQSGNSQESVTEQDSKDSTYSLSSTLTLSKADYEKHKVYACEVTHQGLSSPVTKSFNRGEC

SEQ ID NO: 47 - protein, 121 aa, Artificial Sequence; identical to SEQ ID NO: 1
  Synthetic

SEQ ID NO: 48 - protein, 451 aa, Artificial Sequence
  Synthetic
QVQLVQSGAEVKKPGASVKVSCKASGYTFTSYVMHWVRQKPGQGLEWIGYINPYNEGTESTDKFKGRATMTSDKSTSTVYMELSSLRSEDTAVYYCASIYYGYEGTYFGVWGQGTLVTVSSASTKGPSVFPLAPSSKSTSGGTAALGCLVKDYFPEPVTVSWNSGALTSGVHTFPAVLQSSGLYSLSSVVTVPSSSLGTQTYICNVNHKPSNTKVDKKVEPKSCDKTHTCPPCPAPELLGGPSVFLFPPKPKDTLMISRTPEVTCVVVDVSHEDPEVKFNWYVDGVEVHNAKTKPREEQYNSTYRVVSVLTVLHQDWLNGKEYKCKVSNKALPAPIEKTISKAKGQPREPQVYTLPPSREEMTKNQVSLTCLVKGFYPSDIAVEWESNGQPENNYKTTPPVLDSDGSFFLYSKLTVDKSRWQQGNVFSCSVMHEALHNHYTQKSLSLSPGK

SEQ ID NO: 49 - protein, 121 aa, Artificial Sequence
  Synthetic
QVQLVQSGAEVKKPGASVKVSCKASGYTFTSYVMHWVRQKPGQGLEWIGYINPYNEGTESTDKFKGRATMTSDKSTSTVYMELSSLRSEDTAVYYCASIYYGYDATYFGVWGQGTLVTVSS

SEQ ID NO: 50 - protein, 451 aa, Artificial Sequence
  Synthetic
QVQLVQSGAEVKKPGASVKVSCKASGYTFTSYVMHWVRQKPGQGLEWIGYINPYNEGTESTDKFKGRATMTSDKSTSTVYMELSSLRSEDTAVYYCASIYYGYDATYFGVWGQGTLVTVSSASTKGPSVFPLAPSSKSTSGGTAALGCLVKDYFPEPVTVSWNSGALTSGVHTFPAVLQSSGLYSLSSVVTVPSSSLGTQTYICNVNHKPSNTKVDKKVEPKSCDKTHTCPPCPAPELLGGPSVFLFPPKPKDTLMISRTPEVTCVVVDVSHEDPEVKFNWYVDGVEVHNAKTKPREEQYNSTYRVVSVLTVLHQDWLNGKEYKCKVSNKALPAPIEKTISKAKGQPREPQVYTLPPSREEMTKNQVSLTCLVKGFYPSDIAVEWESNGQPENNYKTTPPVLDSDGSFFLYSKLTVDKSRWQQGNVFSCSVMHEALHNHYTQKSLSLSPGK

SEQ ID NO: 51 - protein, 121 aa, Artificial Sequence
  Synthetic
QVQLVQSGAEVKKPGASVKVSCKASGYTFTSYVMHWVRQKPGQGLEWIGYINPYNDATESTDKFKGRATMTSDKSTSTVYMELSSLRSEDTAVYYCASIYYGYEGTYFGVWGQGTLVTVSS

SEQ ID NO: 52 - protein, 451 aa, Artificial Sequence
  Synthetic
QVQLVQSGAEVKKPGASVKVSCKASGYTFTSYVMHWVRQKPGQGLEWIGYINPYNDATESTDKFKGRATMTSDKSTSTVYMELSSLRSEDTAVYYCASIYYGYEGTYFGVWGQGTLVTVSSASTKGPSVFPLAPSSKSTSGGTAALGCLVKDYFPEPVTVSWNSGALTSGVHTFPAVLQSSGLYSLSSVVTVPSSSLGTQTYICNVNHKPSNTKVDKKVEPKSCDKTHTCPPCPAPELLGGPSVFLFPPKPKDTLMISRTPEVTCVVVDVSHEDPEVKFNWYVDGVEVHNAKTKPREEQYNSTYRVVSVLTVLHQDWLNGKEYKCKVSNKALPAPIEKTISKAKGQPREPQVYTLPPSREEMTKNQVSLTCLVKGFYPSDIAVEWESNGQPENNYKTTPPVLDSDGSFFLYSKLTVDKSRWQQGNVFSCSVMHEALHNHYTQKSLSLSPGK

SEQ ID NO: 53 - protein, 121 aa, Artificial Sequence
  Synthetic
QVQLVQSGAEVKKPGASVKVSCKASGYTFTSYVMHWVRQKPGQGLEWIGYINPYNDATESTDKFKGRATMTSDKSTSTVYMELSSLRSEDTAVYYCASIYYGYDATYFGVWGQGTLVTVSS

SEQ ID NO: 54 - protein, 451 aa, Artificial Sequence
  Synthetic
QVQLVQSGAEVKKPGASVKVSCKASGYTFTSYVMHWVRQKPGQGLEWIGYINPYNDATESTDKFKGRATMTSDKSTSTVYMELSSLRSEDTAVYYCASIYYGYDATYFGVWGQGTLVTVSSASTKGPSVFPLAPSSKSTSGGTAALGCLVKDYFPEPVTVSWNSGALTSGVHTFPAVLQSSGLYSLSSVVTVPSSSLGTQTYICNVNHKPSNTKVDKKVEPKSCDKTHTCPPCPAPELLGGPSVFLFPPKPKDTLMISRTPEVTCVVVDVSHEDPEVKFNWYVDGVEVHNAKTKPREEQYNSTYRVVSVLTVLHQDWLNGKEYKCKVSNKALPAPIEKTISKAKGQPREPQVYTLPPSREEMTKNQVSLTCLVKGFYPSDIAVEWESNGQPENNYKTTPPVLDSDGSFFLYSKLTVDKSRWQQGNVFSCSVMHEALHNHYTQKSLSLSPGK

SEQ ID NO: 55 - protein, 121 aa, Artificial Sequence
  Synthetic
QVQLVQSGAEVKKPGASVKVSCKASGYTFTSYYMHWVRQAPGQGLEWMGIINPSGGSTSYAQKFQGRVTMTRDTSTSTVYMELSSLRSEDTAVYYCARIYYGYDGTYFGVWGQGTLVTVSS

SEQ ID NO: 56 - protein, 107 aa, Artificial Sequence
  Synthetic
EIVLTQSPATLSLSPGERATLSCRASQSVSSYLAWYQQKPGQAPRLLIYDASNRATGIPARFSGSGSGTDFTLTISSLEPEDFAVYYCQQWSSNTLTFGGGTKVEIK

SEQ ID NO: 57 - protein, 117 aa, Artificial Sequence
  Synthetic
QVQLVQSGAEVKKPGASVKVSCKASGYTFTGYYMHWVRQAPGQGLEWMGWINPNSGGTNYAQKFQGRVTMTRDTSISTAYMELSRLRSDDTAVYYCARSQATWFAYWGQGTLVTVSS

SEQ ID NO: 58 - protein, 107 aa, Artificial Sequence
  Synthetic
EIVLTQSPATLSLSPGERATLSCRASQSVSSYLAWYQQKPGQAPRLLIYDASNRATGIPARFSGSGSGTDFTLTISSLEPEDFAVYYCQHYSGYPLTFGGGTKVEIK

SEQ ID NO: 59 - protein, 718 aa, Artificial Sequence
  Synthetic
QVQLVQSGAEVKKPGASVKVSCKASGYTFTSYWMHWVRQAPGQGLEWMGMIHPNSGGTNYNEKFKGRVTMTRDTSISTAYMELSRLRSDDTAVYYCARSQATWFAYWGQGTLVTVSSASTKGPSVFPLAPSSKSTSGGTAALGCLVKDYFPEPVTVSWNSGALTSGVHTFPAVLQSSGLYSLSSVVTVPSSSLGTQTYICNVNHKPSNTKVDKKVEPKSCDKTHTCPPCPAPELLGPSVFLFPPKPKDTLMISRTPEVTCVVVDVSHEDPEVKFNWYVDGVEVHNAKTKPREEQYNSTYRVVSVLTVLHQDWLNGKEYKCKVSNKALPAPIEKTISKAKGQPREPQVYTLPPSREEMTKNQVSLTCLVKGFYPSDIAVEWESNGQPENNYKTTPPVLDSDGSFFLYSKLTVDKSRWQQGNVFSCSVMHEALHNHYTQKSLSLSPGGGGGSGGGGSGGGGSGGGGSDIQMTQSPSSVSASVGDRVTITCRASQGIYSWLAWYQQKPGKAPNLLIYTASTLQSGVPSRFSGSGSGTDFTLTISSLQPEDFATYYCQQANIFPLTFGGGTKVEIKGGGGSGGGGSGGGGSGGGGSQVQLVQSGAEVKKPGASVKVSCKASGYTFTGYYMHWVRQAPGQGLEWMGWINPDSGGTNYAQKFQGRVTMTRDTSISTAYMELNRLRSDDTAVYYCARDQPLGYCTNGVCSYFDYWGQGTLVTVSS

SEQ ID NO: 60 - protein, 215 aa, Artificial Sequence; identical to SEQ ID NO: 46
  Synthetic

SEQ ID NO: 61 - protein, 722 aa, Artificial Sequence
  Synthetic
QVQLVQSGAEVKKPGASVKVSCKASGYTFTSYVMHWVRQKPGQGLEWIGYINPYNEGTESTDKFKGRATMTSDKSTSTVYMELSSLRSEDTAVYYCASIYYGYEGTYFGVWGQGTLVTVSSASTKGPSVFPLAPSSKSTSGGTAALGCLVKDYFPEPVTVSWNSGALTSGVHTFPAVLQSSGLYSLSSVVTVPSSSLGTQTYICNVNHKPSNTKVDKKVEPKSCDKTHTCPPCPAPELLGPSVFLFPPKPKDTLMISRTPEVTCVVVDVSHEDPEVKFNWYVDGVEVHNAKTKPREEQYNSTYRVVSVLTVLHQDWLNGKEYKCKVSNKALPAPIEKTISKAKGQPREPQVYTLPPSREEMTKNQVSLTCLVKGFYPSDIAVEWESNGQPENNYKTTPPVLDSDGSFFLYSKLTVDKSRWQQGNVFSCSVMHEALHNHYTQKSLSLSPGGGGGSGGGGSGGGGSGGGGSDIQMTQSPSSVSASVGDRVTITCRASQGIYSWLAWYQQKPGKAPNLLIYTASTLQSGVPSRFSGSGSGTDFTLTISSLQPEDFATYYCQQANIFPLTFGGGTKVEIKGGGGSGGGGSGGGGSGGGGSQVQLVQSGAEVKKPGASVKVSCKASGYTFTGYYMHWVRQAPGQGLEWMGWINPDSGGTNYAQKFQGRVTMTRDTSISTAYMELNRLRSDDTAVYYCARDQPLGYCTNGVCSYFDYWGQGTLVTVSS

SEQ ID NO: 62 - protein, 213 aa, Artificial Sequence; identical to SEQ ID NO: 42
  Synthetic

SEQ ID NO: 63 - protein, 450 aa, Artificial Sequence
  Synthetic
QVQLVQSGAEVKKPGASVKVSCKASGYTFTSYVMHWVRQKPGQGLEWIGYINPYNEGTESTDKFKGRATMTSDKSTSTVYMELSSLRSEDTAVYYCASIYYGYEGTYFGVWGQGTLVTVSSASTKGPSVFPLAPSSKSTSGGTAALGCLVKDYFPEPVTVSWNSGALTSGVHTFPAVLQSSGLYSLSSVVTVPSSSLGTQTYICNVNHKPSNTKVDKKVEPKSCDKTHTCPPCPAPELLGPSVFLFPPKPKDTLMISRTPEVTCVVVDVSHEDPEVKFNWYVDGVEVHNAKTKPREEQYNSTYRVVSVLTVLHQDWLNGKEYKCKVSNKALPAPIEKTISKAKGQPREPQVYTLPPSREEMTKNQVSLTCLVKGFYPSDIAVEWESNGQPENNYKTTPPVLDSDGSFFLYSKLTVDKSRWQQGNVFSCSVMHEALHNHYTQKSLSLSPGK

SEQ ID NO: 64 - protein, 486 aa, Artificial Sequence
  Synthetic
EIVLTQSPATLSLSPGERATLSCRASSSVSYMHWYQQKPGQAPRPWIYATSNLASGIPARFSGSRSGTDYTLTISSLEPEDFAVYYCQQWSSNTLTFGGGTKVEIKRTVAAPSVFIFPPSDEQLKSGTASVVCLLNNFYPREAKVQWKVDNALQSGNSQESVTEQDSKDSTYSLSSTLTLSKADYEKHKVYACEVTHQGLSSPVTKSFNRGECGGGGSGGGGSGGGGSGGGGSDIQMTQSPSSVSASVGDRVTITCRASQGIYSWLAWYQQKPGKAPNLLIYTASTLQSGVPSRFSGSGSGTDFTLTISSLQPEDFATYYCQQANIFPLTFGGGTKVEIKGGGGSGGGGSGGGGSGGGGSQVQLVQSGAEVKKPGASVKVSCKASGYTFTGYYMHWVRQAPGQGLEWMGWINPDSGGTNYAQKFQGRVTMTRDTSISTAYMELNRLRSDDTAVYYCARDQPLGYCTNGVCSYFDYWGQGTLVTVSS

SEQ ID NO: 65 - protein, 723 aa, Artificial Sequence
  Synthetic
DIQMTQSPSSVSASVGDRVTITCRASQGIYSWLAWYQQKPGKAPNLLIYTASTLQSGVPSRFSGSGSGTDFTLTISSLQPEDFATYYCQQANIFPLTFGGGTKVEIKGGGGSGGGGSGGGGSGGGGSQVQLVQSGAEVKKPGASVKVSCKASGYTFTGYYMHWVRQAPGQGLEWMGWINPDSGGTNYAQKFQGRVTMTRDTSISTAYMELNRLRSDDTAVYYCARDQPLGYCTNGVCSYFDYWGQGTLVTVSSGGGGSGGGGSGGGGSGGGGSQVQLVQSGAEVKKPGASVKVSCKASGYTFTSYVMHWVRQKPGQGLEWIGYINPYNEGTESTDKFKGRATMTSDKSTSTVYMELSSLRSEDTAVYYCASIYYGYEGTYFGVWGQGTLVTVSSASTKGPSVFPLAPSSKSTSGGTAALGCLVKDYFPEPVTVSWNSGALTSGVHTFPAVLQSSGLYSLSSVVTVPSSSLGTQTYICNVNHKPSNTKVDKKVEPKSCDKTHTCPPCPAPELLGPSVFLFPPKPKDTLMISRTPEVTCVVVDVSHEDPEVKFNWYVDGVEVHNAKTKPREEQYNSTYRVVSVLTVLHQDWLNGKEYKCKVSNKALPAPIEKTISKAKGQPREPQVYTLPPSREEMTKNQVSLTCLVKGFYPSDIAVEWESNGQPENNYKTTPPVLDSDGSFFLYSKLTVDKSRWQQGNVFSCSVMHEALHNHYTQKSLSLSPGK

SEQ ID NO: 66 - protein, 213 aa, Artificial Sequence; identical to SEQ ID NO: 42
  Synthetic

SEQ ID NO: 67 - protein, 450 aa, Artificial Sequence
  Synthetic
QVQLVQSGAEVKKPGASVKVSCKASGYTFTSYVMHWVRQKPGQGLEWIGYINPYNEGTESTDKFKGRATMTSDKSTSTVYMELSSLRSEDTAVYYCASIYYGYEGTYFGVWGQGTLVTVSSASTKGPSVFPLAPSSKSTSGGTAALGCLVKDYFPEPVTVSWNSGALTSGVHTFPAVLQSSGLYSLSSVVTVPSSSLGTQTYICNVNHKPSNTKVDKKVEPKSCDKTHTCPPCPAPELLGPSVFLFPPKPKDTLMISRTPEVTCVVVDVSHEDPEVKFNWYVDGVEVHNAKTKPREEQYNSTYRVVSVLTVLHQDWLNGKEYKCKVSNKALPAPIEKTISKAKGQPREPQVYTLPPCREEMTKNQVSLWCLVKGFYPSDIAVEWESNGQPENNYKTTPPVLDSDGSFFLYSKLTVDKSRWQQGNVFSCSVMHEALHNHYTQKSLSLSPGK

SEQ ID NO: 68 - protein, 459 aa, Artificial Sequence
  Synthetic
QVQLVQSGAEVKKPGASVKVSCKASGYTFTGYYMHWVRQAPGQGLEWMGWINPDSGGTNYAQKFQGRVTMTRDTSISTAYMELNRLRSDDTAVYYCARDQPLGYCTNGVCSYFDYWGQGTLVTVSSASVAAPSVFIFPPSDEQLKSGTASVVCLLNNFYPREAKVQWKVDNALQSGNSQESVTEQDSKDSTYSLSSTLTLSKADYEKHKVYACEVTHQGLSSPVTKSFNRGECDKTHTCPPCPAPELLGPSVFLFPPKPKDTLMISRTPEVTCVVVDVSHEDPEVKFNWYVDGVEVHNAKTKPREEQYNSTYRVVSVLTVLHQDWLNGKEYKCKVSNKALPAPIEKTISKAKGQPREPQVCTLPPSREEMTKNQVSLSCAVKGFYPSDIAVEWESNGQPENNYKTTPPVLDSDGSFFLVSKLTVDKSRWQQGNVFSCSVMHEALHNRFTQKSLSLSPGK

SEQ ID NO: 69 - protein, 213 aa, Artificial Sequence; identical to SEQ ID NO: 42
  Synthetic

SEQ ID NO: 70 - protein, 212 aa, Artificial Sequence
  Synthetic
DIQMTQSPSSVSASVGDRVTITCRASQGIYSWLAWYQQKPGKAPNLLIYTASTLQSGVPSRFSGSGSGTDFTLTISSLQPEDFATYYCQQANIFPLTFGGGTKVEIKSSASTKGPSVFPLAPSSKSTSGGTAALGCLVKDYFPEPVTVSWNSGALTSGVHTFPAVLQSSGLYSLSSVVTVPSSSLGTQTYICNVNHKPSNTKVDKKVEPKSC

SEQ ID NO: 71 - protein, 450 aa, Artificial Sequence
  Synthetic
QVQLVQSGAEVKKPGASVKVSCKASGYTFTSYVMHWVRQKPGQGLEWIGYINPYNEGTESTDKFKGRATMTSDKSTSTVYMELSSLRSEDTAVYYCASIYYGYEGTYFGVWGQGTLVTVSSASTKGPSVFPLAPSSKSTSGGTAALGCLVKDYFPEPVTVSWNSGALTSGVHTFPAVLQSSGLYSLSSVVTVPSSSLGTQTYICNVNHKPSNTKVDKKVEPKSCDKTHTCPPCPAPELLGPSVFLFPPKPKDTLMISRTPEVTCVVVDVSHEDPEVKFNWYVDGVEVHNAKTKPREEQYNSTYRVVSVLTVLHQDWLNGKEYKCKVSNKALPAPIEKTISKAKGQPREPQVYTDPPSREEMTKNQVSLTCEVKGFYPSDIAVEWESNGQPENNYKTTPPVLDSDGSFFLYSKLTVDKSRWQQGNVFSCSVMHEALHNHYTQKSLSLSPGK

SEQ ID NO: 72 - protein, 459 aa, Artificial Sequence
  Synthetic
QVQLVQSGAEVKKPGASVKVSCKASGYTFTGYYMHWVRQAPGQGLEWMGWINPDSGGTNYAQKFQGRVTMTRDTSISTAYMELNRLRSDDTAVYYCARDQPLGYCTNGVCSYFDYWGQGTLVTVSSASVAAPSVFIFPPSDEQLKSGTASVVCLLNNFYPREAKVQWKVDNALQSGNSQESVTEQDSKDSTYSLSSTLTLSKADYEKHKVYACEVTHQGLSSPVTKSFNRGECDKTHTCPPCPAPELLGPSVFLFPPKPKDTLMISRTPEVTCVVVDVSHEDPEVKFNWYVDGVEVHNAKTKPREEQYNSTYRVVSVLTVLHQDWLNGKEYKCKVSNKALPAPIEKTISKAKGQPREPQVYTKPPSREEMTKNQVSLTCKVKGFYPSDIAVEWESNGQPENNYKTTPPVLDSDGSFFLYSKLTVDKSRWQQGNVFSCSVMHEALHNRFTQKSLSLSPGK

SEQ ID NO: 73 - protein, 213 aa, Artificial Sequence; identical to SEQ ID NO: 42
  Synthetic

SEQ ID NO: 74 - protein, 212 aa, Artificial Sequence; identical to SEQ ID NO: 70
  Synthetic

SEQ ID NO: 75 - protein, 450 aa, Artificial Sequence
  Synthetic
QVQLVQSGAEVKKPGASVKVSCKASGYTFTSYVMHWVRQKPGQGLEWIGYINPYNEGTESTDKFKGRATMTSDKSTSTVYMELSSLRSEDTAVYYCASIYYGYEGTYFGVWGQGTLVTVSSASTKGPSVFPLAPSSKSTSGGTAALGCLVKDYFPEPVTVSWNSGALTSGVHTFPAVLQSSGLYSLSSVVTVPSSSLGTQTYICNVNHKPSNTKVDKKVEPKSCDKTHTCPPCPAPELLGPSVFLFPPKPKDTLMISRTPEVTCVVVDVSHEDPEVKFNWYVDGVEVHNAKTKPREEQYNSTYRVVSVLTVLHQDWLNGKEYKCKVSNKALPAPIEKTISKAKGQPREPQVYVYPPSREEMTKNQVSLTCLVKGFYPSDIAVEWESNGQPENNYKTTPPVLDSDGSFALVSKLTVDKSRWQQGNVFSCSVMHEALHNHYTQKSLSLSPGK

SEQ ID NO: 76 - protein, 459 aa, Artificial Sequence
  Synthetic
QVQLVQSGAEVKKPGASVKVSCKASGYTFTGYYMHWVRQAPGQGLEWMGWINPDSGGTNYAQKFQGRVTMTRDTSISTAYMELNRLRSDDTAVYYCARDQPLGYCTNGVCSYFDYWGQGTLVTVSSASVAAPSVFIFPPSDEQLKSGTASVVCLLNNFYPREAKVQWKVDNALQSGNSQESVTEQDSKDSTYSLSSTLTLSKADYEKHKVYACEVTHQGLSSPVTKSFNRGECDKTHTCPPCPAPELLGPSVFLFPPKPKDTLMISRTPEVTCVVVDVSHEDPEVKFNWYVDGVEVHNAKTKPREEQYNSTYRVVSVLTVLHQDWLNGKEYKCKVSNKALPAPIEKTISKAKGQPREPQVYVLPPSREEMTKNQVSLLCLVKGFYPSDIAVEWESNGQPENNYLTWPPVLDSDGSFFLYSKLTVDKSRWQQGNVFSCSVMHEALHNRFTQKSLSLSPGK

SEQ ID NO: 77 - protein, 213 aa, Artificial Sequence; identical to SEQ ID NO: 42
  Synthetic

SEQ ID NO: 78 - protein, 212 aa, Artificial Sequence; identical to SEQ ID NO: 70
  Synthetic

SEQ ID NO: 79 - protein, 450 aa, Artificial Sequence; identical to SEQ ID NO: 67
  Synthetic

SEQ ID NO: 80 - protein, 481 aa, Artificial Sequence
  Synthetic
QVQLVQSGAEVKKPGASVKVSCKASGYTFTGYYMHWVRQAPGQGLEWMGWINPDSGGTNYAQKFQGRVTMTRDTSISTAYMELNRLRSDDTAVYYCARDQPLGYCTNGVCSYFDYWGQGTLVTVSSDLKNVFPPEVAVFEPSEAEISHTQKATLVCLATGFYPDHVELSWWVNGKEVHSGVCTDPQPLKEQPALQDSRYALSSRLRVSATFWQNPRNHFRCQVQFYGLSENDEWTQDRAKPVTQIVSAEAWGRASDKTHTCPPCPAPELLGPSVFLFPPKPKDTLMISRTPEVTCVVVDVSHEDPEVKFNWYVDGVEVHNAKTKPREEQYNSTYRVVSVLTVLHQDWLNGKEYKCKVSNKALPAPIEKTISKAKGQPREPQVCTLPPSREEMTKNQVSLSCAVKGFYPSDIAVEWESNGQPENNYKTTPPVLDSDGSFFLVSKLTVDKSRWQQGNVFSCSVMHEALHNRFTQKSLSLSPGK

SEQ ID NO: 81 - protein, 213 aa, Artificial Sequence; identical to SEQ ID NO: 42
  Synthetic

SEQ ID NO: 82 - protein, 202 aa, Artificial Sequence
  Synthetic
DIQMTQSPSSVSASVGDRVTITCRASQGIYSWLAWYQQKPGKAPNLLIYTASTLQSGVPSRFSGSGSGTDFTLTISSLQPEDFATYYCQQANIFPLTFGGGTKVEIKPDIQNPDPAVYQLRDSKSSDKSVCLFTDFDSQTQVSQSKDSDVYITDKCVLDMRSMDFKSNSAVAWSQKSDFACANAFQNSIIPEDTFFPSPESS

SEQ ID NO: 83 - protein, 450 aa, Artificial Sequence; identical to SEQ ID NO: 67
  Synthetic

SEQ ID NO: 84 - protein, 725 aa, Artificial Sequence
  Synthetic
QVQLVQSGAEVKKPGASVKVSCKASGYTFTSYVMHWVRQKPGQGLEWIGYINPYNEGTESTDKFKGRATMTSDKSTSTVYMELSSLRSEDTAVYYCASIYYGYEGTYFGVWGQGTLVTVSSASTKGPSVFPLAPSSKSTSGGTAALGCLVKDYFPEPVTVSWNSGALTSGVHTFPAVLQSSGLYSLSSVVTVPSSSLGTQTYICNVNHKPSNTKVDKKVEPKSCGGGGSGGGGSGGGGSGGGGSQVQLVQSGAEVKKPGASVKVSCKASGYTFTGYYMHWVRQAPGQGLEWMGWINPDSGGTNYAQKFQGRVTMTRDTSISTAYMELNRLRSDDTAVYYCARDQPLGYCTNGVCSYFDYWGQGTLVTVSSDLKNVFPPEVAVFEPSEAEISHTQKATLVCLATGFYPDHVELSWWVNGKEVHSGVCTDPQPLKEQPALQDSRYALSSRLRVSATFWQNPRNHFRCQVQFYGLSENDEWTQDRAKPVTQIVSAEAWGRASDKTHTCPPCPAPELLGPSVFLFPPKPKDTLMISRTPEVTCVVVDVSHEDPEVKFNWYVDGVEVHNAKTKPREEQYNSTYRVVSVLTVLHQDWLNGKEYKCKVSNKALPAPIEKTISKAKGQPREPQVYTLPPSREEMTKNQVSLSCAVKGFYPSDIAVEWESNGQPENNYKTTPPVLDSDGSFFLVSKLTVDKSRWQQGNVFSCSVMHEALHNRFTQKSLSLSPGK

SEQ ID NO: 85 - protein, 213 aa, Artificial Sequence; identical to SEQ ID NO: 42
  Synthetic

SEQ ID NO: 86 - protein, 202 aa, Artificial Sequence; identical to SEQ ID NO: 82
  Synthetic

SEQ ID NO: 87 - protein, 712 aa, Artificial Sequence
  Synthetic
QVQLVQSGAEVKKPGASVKVSCKASGYTFTSYVMHWVRQKPGQGLEWIGYINPYNEGTESTDKFKGRATMTSDKSTSTVYMELSSLRSEDTAVYYCASIYYGYEGTYFGVWGQGTLVTVSSASTKGPSVFPLAPSSKSTSGGTAALGCLVKDYFPEPVTVSWNSGALTSGVHTFPAVLQSSGLYSLSSVVTVPSSSLGTQTYICNVNHKPSNTKVDKKVEPKSCDKTHTCPPCPAPELLGPSVFLFPPKPKDTLMISRTPEVTCVVVDVSHEDPEVKFNWYVDGVEVHNAKTKPREEQYNSTYRVVSVLTVLHQDWLNGKEYKCKVSNKALPAPIEKTISKAKGQPREPQVYTLPPSREEMTKNQVSLTCLVKGFYPSDIAVEWESNGQPENNYKTTPPVLDSDGSFFLYSKLTVDKSRWQQGNVFSCSVMHEALHNHYTQKSLSLSPGGGGGSGGGGSGGGGSGGGGSQVQLVQSGAEVKKPGASVKVSCKASGYTFAGFEMHWVRQAPGQGLEWMGAIDPKTGGTDYNQKFKDRVTMTRDTSISTAYMELSRLRSDDTAVYYCARDLGYFDVWGQGTLVTVSSGGGGSGGGGSGGGGSGGGGSDIQMTQSPSSLSASVGDRVTITCRASQDIRSNLNWYQQKPGGAVKLLIYYTSRLHSGVPSRFSGSGSGTDYTLTISSLQPEDFATYFCQQSEKLPRTFGGGTKVEIR

SEQ ID NO: 88 - protein, 213 aa, Artificial Sequence; identical to SEQ ID NO: 42
  Synthetic

SEQ ID NO: 89 - protein, 450 aa, Artificial Sequence; identical to SEQ ID NO: 63
  Synthetic

SEQ ID NO: 90 - protein, 476 aa, Artificial Sequence
  Synthetic
EIVLTQSPATLSLSPGERATLSCRASSSVSYMHWYQQKPGQAPRPWIYATSNLASGIPARFSGSRSGTDYTLTISSLEPEDFAVYYCQQWSSNTLTFGGGTKVEIKRTVAAPSVFIFPPSDEQLKSGTASVVCLLNNFYPREAKVQWKVDNALQSGNSQESVTEQDSKDSTYSLSSTLTLSKADYEKHKVYACEVTHQGLSSPVTKSFNRGECGGGGSGGGGSGGGGSGGGGSQVQLVQSGAEVKKPGASVKVSCKASGYTFAGFEMHWVRQAPGQGLEWMGAIDPKTGGTDYNQKFKDRVTMTRDTSISTAYMELSRLRSDDTAVYYCARDLGYFDVWGQGTLVTVSSGGGGSGGGGSGGGGSGGGGSDIQMTQSPSSLSASVGDRVTITCRASQDIRSNLNWYQQKPGGAVKLLIYYTSRLHSGVPSRFSGSGSGTDYTLTISSLQPEDFATYFCQQSEKLPRTFGGGTKVEIR

SEQ ID NO: 91 - protein, 713 aa, Artificial Sequence
  Synthetic
QVQLVQSGAEVKKPGASVKVSCKASGYTFAGFEMHWVRQAPGQGLEWMGAIDPKTGGTDYNQKFKDRVTMTRDTSISTAYMELSRLRSDDTAVYYCARDLGYFDVWGQGTLVTVSSGGGGSGGGGSGGGGSGGGGSDIQMTQSPSSLSASVGDRVTITCRASQDIRSNLNWYQQKPGGAVKLLIYYTSRLHSGVPSRFSGSGSGTDYTLTISSLQPEDFATYFCQQSEKLPRTFGGGTKVEIRGGGGSGGGGSGGGGSGGGGSQVQLVQSGAEVKKPGASVKVSCKASGYTFTSYVMHWVRQKPGQGLEWIGYINPYNEGTESTDKFKGRATMTSDKSTSTVYMELSSLRSEDTAVYYCASIYYGYEGTYFGVWGQGTLVTVSSASTKGPSVFPLAPSSKSTSGGTAALGCLVKDYFPEPVTVSWNSGALTSGVHTFPAVLQSSGLYSLSSVVTVPSSSLGTQTYICNVNHKPSNTKVDKKVEPKSCDKTHTCPPCPAPELLGPSVFLFPPKPKDTLMISRTPEVTCVVVDVSHEDPEVKFNWYVDGVEVHNAKTKPREEQYNSTYRVVSVLTVLHQDWLNGKEYKCKVSNKALPAPIEKTISKAKGQPREPQVYTLPPSREEMTKNQVSLTCLVKGFYPSDIAVEWESNGQPENNYKTTPPVLDSDGSFFLYSKLTVDKSRWQQGNVFSCSVMHEALHNHYTQKSLSLSPGK

SEQ ID NO: 92 - protein, 213 aa, Artificial Sequence; identical to SEQ ID NO: 42
  Synthetic

SEQ ID NO: 93 - protein, 450 aa, Artificial Sequence; identical to SEQ ID NO: 67
  Synthetic

SEQ ID NO: 94 - protein, 449 aa, Artificial Sequence
  Synthetic
QVQLVQSGAEVKKPGASVKVSCKASGYTFAGFEMHWVRQAPGQGLEWMGAIDPKTGGTDYNQKFKDRVTMTRDTSISTAYMELSRLRSDDTAVYYCARDLGYFDVWGQGTLVTVSSASVAAPSVFIFPPSDEQLKSGTASVVCLLNNFYPREAKVQWKVDNALQSGNSQESVTEQDSKDSTYSLSSTLTLSKADYEKHKVYACEVTHQGLSSPVTKSFNRGECDKTHTCPPCPAPELLGPSVFLFPPKPKDTLMISRTPEVTCVVVDVSHEDPEVKFNWYVDGVEVHNAKTKPREEQYNSTYRVVSVLTVLHQDWLNGKEYKCKVSNKALPAPIEKTISKAKGQPREPQVCTLPPSREEMTKNQVSLSCAVKGFYPSDIAVEWESNGQPENNYKTTPPVLDSDGSFFLVSKLTVDKSRWQQGNVFSCSVMHEALHNRFTQKSLSLSPGK

SEQ ID NO: 95 - protein, 213 aa, Artificial Sequence; identical to SEQ ID NO: 42
  Synthetic

SEQ ID NO: 96 - protein, 212 aa, Artificial Sequence
  Synthetic
DIQMTQSPSSLSASVGDRVTITCRASQDIRSNLNWYQQKPGGAVKLLIYYTSRLHSGVPSRFSGSGSGTDYTLTISSLQPEDFATYFCQQSEKLPRTFGGGTKVEIRSSASTKGPSVFPLAPSSKSTSGGTAALGCLVKDYFPEPVTVSWNSGALTSGVHTFPAVLQSSGLYSLSSVVTVPSSSLGTQTYICNVNHKPSNTKVDKKVEPKSC

SEQ ID NO: 97 - protein, 450 aa, Artificial Sequence; identical to SEQ ID NO: 71
  Synthetic

SEQ ID NO: 98 - protein, 449 aa, Artificial Sequence
  Synthetic
QVQLVQSGAEVKKPGASVKVSCKASGYTFAGFEMHWVRQAPGQGLEWMGAIDPKTGGTDYNQKFKDRVTMTRDTSISTAYMELSRLRSDDTAVYYCARDLGYFDVWGQGTLVTVSSASVAAPSVFIFPPSDEQLKSGTASVVCLLNNFYPREAKVQWKVDNALQSGNSQESVTEQDSKDSTYSLSSTLTLSKADYEKHKVYACEVTHQGLSSPVTKSFNRGECDKTHTCPPCPAPELLGPSVFLFPPKPKDTLMISRTPEVTCVVVDVSHEDPEVKFNWYVDGVEVHNAKTKPREEQYNSTYRVVSVLTVLHQDWLNGKEYKCKVSNKALPAPIEKTISKAKGQPREPQVYTKPPSREEMTKNQVSLTCKVKGFYPSDIAVEWESNGQPENNYKTTPPVLDSDGSFFLYSKLTVDKSRWQQGNVFSCSVMHEALHNRFTQKSLSLSPGK

SEQ ID NO: 99 - protein, 213 aa, Artificial Sequence; identical to SEQ ID NO: 42
  Synthetic

SEQ ID NO: 100 - protein, 212 aa, Artificial Sequence; identical to SEQ ID NO: 96
  Synthetic

SEQ ID NO: 101 - protein, 450 aa, Artificial Sequence; identical to SEQ ID NO: 75
  Synthetic

SEQ ID NO: 102 - protein, 449 aa, Artificial Sequence
  Synthetic
QVQLVQSGAEVKKPGASVKVSCKASGYTFAGFEMHWVRQAPGQGLEWMGAIDPKTGGTDYNQKFKDRVTMTRDTSISTAYMELSRLRSDDTAVYYCARDLGYFDVWGQGTLVTVSSASVAAPSVFIFPPSDEQLKSGTASVVCLLNNFYPREAKVQWKVDNALQSGNSQESVTEQDSKDSTYSLSSTLTLSKADYEKHKVYACEVTHQGLSSPVTKSFNRGECDKTHTCPPCPAPELLGPSVFLFPPKPKDTLMISRTPEVTCVVVDVSHEDPEVKFNWYVDGVEVHNAKTKPREEQYNSTYRVVSVLTVLHQDWLNGKEYKCKVSNKALPAPIEKTISKAKGQPREPQVYVLPPSREEMTKNQVSLLCLVKGFYPSDIAVEWESNGQPENNYLTWPPVLDSDGSFFLYSKLTVDKSRWQQGNVFSCSVMHEALHNRFTQKSLSLSPGK

SEQ ID NO: 103 - protein, 213 aa, Artificial Sequence; identical to SEQ ID NO: 42
  Synthetic

SEQ ID NO: 104 - protein, 212 aa, Artificial Sequence; identical to SEQ ID NO: 96
  Synthetic

SEQ ID NO: 105 - protein, 450 aa, Artificial Sequence; identical to SEQ ID NO: 67
  Synthetic

SEQ ID NO: 106 - protein, 471 aa, Artificial Sequence
  Synthetic
QVQLVQSGAEVKKPGASVKVSCKASGYTFAGFEMHWVRQAPGQGLEWMGAIDPKTGGTDYNQKFKDRVTMTRDTSISTAYMELSRLRSDDTAVYYCARDLGYFDVWGQGTLVTVSSDLKNVFPPEVAVFEPSEAEISHTQKATLVCLATGFYPDHVELSWWVNGKEVHSGVCTDPQPLKEQPALQDSRYALSSRLRVSATFWQNPRNHFRCQVQFYGLSENDEWTQDRAKPVTQIVSAEAWGRASDKTHTCPPCPAPELLGPSVFLFPPKPKDTLMISRTPEVTCVVVDVSHEDPEVKFNWYVDGVEVHNAKTKPREEQYNSTYRVVSVLTVLHQDWLNGKEYKCKVSNKALPAPIEKTISKAKGQPREPQVCTLPPSREEMTKNQVSLSCAVKGFYPSDIAVEWESNGQPENNYKTTPPVLDSDGSFFLVSKLTVDKSRWQQGNVFSCSVMHEALHNRFTQKSLSLSPGK

SEQ ID NO: 107 - protein, 213 aa, Artificial Sequence; identical to SEQ ID NO: 42
  Synthetic

SEQ ID NO: 108 - protein, 202 aa, Artificial Sequence
  Synthetic
DIQMTQSPSSLSASVGDRVTITCRASQDIRSNLNWYQQKPGGAVKLLIYYTSRLHSGVPSRFSGSGSGTDYTLTISSLQPEDFATYFCQQSEKLPRTFGGGTKVEIRPDIQNPDPAVYQLRDSKSSDKSVCLFTDFDSQTQVSQSKDSDVYITDKCVLDMRSMDFKSNSAVAWSQKSDFACANAFQNSIIPEDTFFPSPESS

SEQ ID NO: 109 - protein, 450 aa, Artificial Sequence; identical to SEQ ID NO: 67
  Synthetic

SEQ ID NO: 110 - protein, 715 aa, Artificial Sequence
  Synthetic
QVQLVQSGAEVKKPGASVKVSCKASGYTFTSYVMHWVRQKPGQGLEWIGYINPYNEGTESTDKFKGRATMTSDKSTSTVYMELSSLRSEDTAVYYCASIYYGYEGTYFGVWGQGTLVTVSSASTKGPSVFPLAPSSKSTSGGTAALGCLVKDYFPEPVTVSWNSGALTSGVHTFPAVLQSSGLYSLSSVVTVPSSSLGTQTYICNVNHKPSNTKVDKKVEPKSCGGGGSGGGGSGGGGSGGGGSQVQLVQSGAEVKKPGASVKVSCKASGYTFAGFEMHWVRQAPGQGLEWMGAIDPKTGGTDYNQKFKDRVTMTRDTSISTAYMELSRLRSDDTAVYYCARDLGYFDVWGQGTLVTVSSDLKNVFPPEVAVFEPSEAEISHTQKATLVCLATGFYPDHVELSWWVNGKEVHSGVCTDPQPLKEQPALQDSRYALSSRLRVSATFWQNPRNHFRCQVQFYGLSENDEWTQDRAKPVTQIVSAEAWGRASDKTHTCPPCPAPELLGPSVFLFPPKPKDTLMISRTPEVTCVVVDVSHEDPEVKFNWYVDGVEVHNAKTKPREEQYNSTYRVVSVLTVLHQDWLNGKEYKCKVSNKALPAPIEKTISKAKGQPREPQVYTLPPSREEMTKNQVSLSCAVKGFYPSDIAVEWESNGQPENNYKTTPPVLDSDGSFFLVSKLTVDKSRWQQGNVFSCSVMHEALHNRFTQKSLSLSPGK

SEQ ID NO: 111 - protein, 213 aa, Artificial Sequence; identical to SEQ ID NO: 42
  Synthetic

SEQ ID NO: 112 - protein, 202 aa, Artificial Sequence; identical to SEQ ID NO: 108
  Synthetic

SEQ ID NO: 113 - protein, 716 aa, Artificial Sequence
  Synthetic
QVQLVQSGAEVKKPGASVKVSCKASGYTFTSYVMHWVRQKPGQGLEWIGYINPYNEGTESTDKFKGRATMTSDKSTSTVYMELSSLRSEDTAVYYCASIYYGYEGTYFGVWGQGTLVTVSSASTKGPSVFPLAPSSKSTSGGTAALGCLVKDYFPEPVTVSWNSGALTSGVHTFPAVLQSSGLYSLSSVVTVPSSSLGTQTYICNVNHKPSNTKVDKKVEPKSCDKTHTCPPCPAPELLGPSVFLFPPKPKDTLMISRTPEVTCVVVDVSHEDPEVKFNWYVDGVEVHNAKTKPREEQYNSTYRVVSVLTVLHQDWLNGKEYKCKVSNKALPAPIEKTISKAKGQPREPQVYTLPPSREEMTKNQVSLTCLVKGFYPSDIAVEWESNGQPENNYKTTPPVLDSDGSFFLYSKLTVDKSRWQQGNVFSCSVMHEALHNHYTQKSLSLSPGGGGGSGGGGSGGGGSGGGGSEIVLTQSPATLSLSPGERATLSCRASKSVRTGMHWYQQKPGQAPRLLIYGASNLESGIPARFSGSGSGTDFTLTISSLEPEDFAVYYCQQSWNHFTFGQGTKLEIKGGGGSGGGGSGGGGSGGGGSQVQLQESGPGLVKPSETLSLTCTVSGFSLTSYNVHWIRQPPGKGLEWIGVIWSGVRTDYNSVLKPRVTISVDTSKNQFSLKLSSVTAADTAVYYCARGTYDDNYHDVMDAWGQGTLVTVSS

SEQ ID NO: 114 - protein, 213 aa, Artificial Sequence; identical to SEQ ID NO: 42
  Synthetic

SEQ ID NO: 115 - protein, 450 aa, Artificial Sequence; identical to SEQ ID NO: 63
  Synthetic

SEQ ID NO: 116 - protein, 480 aa, Artificial Sequence
  Synthetic
EIVLTQSPATLSLSPGERATLSCRASSSVSYMHWYQQKPGQAPRPWIYATSNLASGIPARFSGSRSGTDYTLTISSLEPEDFAVYYCQQWSSNTLTFGGGTKVEIKRTVAAPSVFIFPPSDEQLKSGTASVVCLLNNFYPREAKVQWKVDNALQSGNSQESVTEQDSKDSTYSLSSTLTLSKADYEKHKVYACEVTHQGLSSPVTKSFNRGECGGGGSGGGGSGGGGSGGGGSEIVLTQSPATLSLSPGERATLSCRASKSVRTGMHWYQQKPGQAPRLLIYGASNLESGIPARFSGSGSGTDFTLTISSLEPEDFAVYYCQQSWNHFTFGQGTKLEIKGGGGSGGGGSGGGGSGGGGSQVQLQESGPGLVKPSETLSLTCTVSGFSLTSYNVHWIRQPPGKGLEWIGVIWSGVRTDYNSVLKPRVTISVDTSKNQFSLKLSSVTAADTAVYYCARGTYDDNYHDVMDAWGQGTLVTVSS

SEQ ID NO: 117 - protein, 717 aa, Artificial Sequence
  Synthetic
EIVLTQSPATLSLSPGERATLSCRASKSVRTGMHWYQQKPGQAPRLLIYGASNLESGIPARFSGSGSGTDFTLTISSLEPEDFAVYYCQQSWNHFTFGQGTKLEIKGGGGSGGGGSGGGGSGGGGSQVQLQESGPGLVKPSETLSLTCTVSGFSLTSYNVHWIRQPPGKGLEWIGVIWSGVRTDYNSVLKPRVTISVDTSKNQFSLKLSSVTAADTAVYYCARGTYDDNYHDVMDAWGQGTLVTVSSGGGGSGGGGSGGGGSGGGGSQVQLVQSGAEVKKPGASVKVSCKASGYTFTSYVMHWVRQKPGQGLEWIGYINPYNEGTESTDKFKGRATMTSDKSTSTVYMELSSLRSEDTAVYYCASIYYGYEGTYFGVWGQGTLVTVSSASTKGPSVFPLAPSSKSTSGGTAALGCLVKDYFPEPVTVSWNSGALTSGVHTFPAVLQSSGLYSLSSVVTVPSSSLGTQTYICNVNHKPSNTKVDKKVEPKSCDKTHTCPPCPAPELLGPSVFLFPPKPKDTLMISRTPEVTCVVVDVSHEDPEVKFNWYVDGVEVHNAKTKPREEQYNSTYRVVSVLTVLHQDWLNGKEYKCKVSNKALPAPIEKTISKAKGQPREPQVYTLPPSREEMTKNQVSLTCLVKGFYPSDIAVEWESNGQPENNYKTTPPVLDSDGSFFLYSKLTVDKSRWQQGNVFSCSVMHEALHNHYTQKSLSLSPGK

SEQ ID NO: 118 - protein, 213 aa, Artificial Sequence; identical to SEQ ID NO: 42
  Synthetic

SEQ ID NO: 119 - protein, 450 aa, Artificial Sequence; identical to SEQ ID NO: 67
  Synthetic

SEQ ID NO: 120 - protein, 454 aa, Artificial Sequence
  Synthetic
QVQLQESGPGLVKPSETLSLTCTVSGFSLTSYNVHWIRQPPGKGLEWIGVIWSGVRTDYNSVLKPRVTISVDTSKNQFSLKLSSVTAADTAVYYCARGTYDDNYHDVMDAWGQGTLVTVSSASVAAPSVFIFPPSDEQLKSGTASVVCLLNNFYPREAKVQWKVDNALQSGNSQESVTEQDSKDSTYSLSSTLTLSKADYEKHKVYACEVTHQGLSSPVTKSFNRGECDKTHTCPPCPAPELLGPSVFLFPPKPKDTLMISRTPEVTCVVVDVSHEDPEVKFNWYVDGVEVHNAKTKPREEQYNSTYRVVSVLTVLHQDWLNGKEYKCKVSNKALPAPIEKTISKAKGQPREPQVCTLPPSREEMTKNQVSLSCAVKGFYPSDIAVEWESNGQPENNYKTTPPVLDSDGSFFLVSKLTVDKSRWQQGNVFSCSVMHEALHNRFTQKSLSLSPGK

SEQ ID NO: 121 - protein, 213 aa, Artificial Sequence; identical to SEQ ID NO: 42
  Synthetic

SEQ ID NO: 122 - protein, 211 aa, Artificial Sequence
  Synthetic
EIVLTQSPATLSLSPGERATLSCRASKSVRTGMHWYQQKPGQAPRLLIYGASNLESGIPARFSGSGSGTDFTLTISSLEPEDFAVYYCQQSWNHFTFGQGTKLEIKSSASTKGPSVFPLAPSSKSTSGGTAALGCLVKDYFPEPVTVSWNSGALTSGVHTFPAVLQSSGLYSLSSVVTVPSSSLGTQTYICNVNHKPSNTKVDKKVEPKSC

SEQ ID NO: 123 - protein, 450 aa, Artificial Sequence; identical to SEQ ID NO: 71
  Synthetic

SEQ ID NO: 124 - protein, 454 aa, Artificial Sequence
  Synthetic
QVQLQESGPGLVKPSETLSLTCTVSGFSLTSYNVHWIRQPPGKGLEWIGVIWSGVRTDYNSVLKPRVTISVDTSKNQFSLKLSSVTAADTAVYYCARGTYDDNYHDVMDAWGQGTLVTVSSASVAAPSVFIFPPSDEQLKSGTASVVCLLNNFYPREAKVQWKVDNALQSGNSQESVTEQDSKDSTYSLSSTLTLSKADYEKHKVYACEVTHQGLSSPVTKSFNRGECDKTHTCPPCPAPELLGPSVFLFPPKPKDTLMISRTPEVTCVVVDVSHEDPEVKFNWYVDGVEVHNAKTKPREEQYNSTYRVVSVLTVLHQDWLNGKEYKCKVSNKALPAPIEKTISKAKGQPREPQVYTKPPSREEMTKNQVSLTCKVKGFYPSDIAVEWESNGQPENNYKTTPPVLDSDGSFFLYSKLTVDKSRWQQGNVFSCSVMHEALHNRFTQKSLSLSPGK

SEQ ID NO: 125 - protein, 213 aa, Artificial Sequence; identical to SEQ ID NO: 42
  Synthetic

SEQ ID NO: 126 - protein, 211 aa, Artificial Sequence; identical to SEQ ID NO: 122
  Synthetic

SEQ ID NO: 127 - protein, 450 aa, Artificial Sequence; identical to SEQ ID NO: 75
  Synthetic

SEQ ID NO: 128 - protein, 454 aa, Artificial Sequence
  Synthetic
QVQLQESGPGLVKPSETLSLTCTVSGFSLTSYNVHWIRQPPGKGLEWIGVIWSGVRTDYNSVLKPRVTISVDTSKNQFSLKLSSVTAADTAVYYCARGTYDDNYHDVMDAWGQGTLVTVSSASVAAPSVFIFPPSDEQLKSGTASVVCLLNNFYPREAKVQWKVDNALQSGNSQESVTEQDSKDSTYSLSSTLTLSKADYEKHKVYACEVTHQGLSSPVTKSFNRGECDKTHTCPPCPAPELLGPSVFLFPPKPKDTLMISRTPEVTCVVVDVSHEDPEVKFNWYVDGVEVHNAKTKPREEQYNSTYRVVSVLTVLHQDWLNGKEYKCKVSNKALPAPIEKTISKAKGQPREPQVYVLPPSREEMTKNQVSLLCLVKGFYPSDIAVEWESNGQPENNYLTWPPVLDSDGSFFLYSKLTVDKSRWQQGNVFSCSVMHEALHNRFTQKSLSLSPGK

SEQ ID NO: 129 - protein, 213 aa, Artificial Sequence; identical to SEQ ID NO: 42
  Synthetic

SEQ ID NO: 130 - protein, 211 aa, Artificial Sequence; identical to SEQ ID NO: 122
  Synthetic

SEQ ID NO: 131 - protein, 450 aa, Artificial Sequence; identical to SEQ ID NO: 67
  Synthetic

SEQ ID NO: 132 - protein, 476 aa, Artificial Sequence
  Synthetic
QVQLQESGPGLVKPSETLSLTCTVSGFSLTSYNVHWIRQPPGKGLEWIGVIWSGVRTDYNSVLKPRVTISVDTSKNQFSLKLSSVTAADTAVYYCARGTYDDNYHDVMDAWGQGTLVTVSSDLKNVFPPEVAVFEPSEAEISHTQKATLVCLATGFYPDHVELSWWVNGKEVHSGVCTDPQPLKEQPALQDSRYALSSRLRVSATFWQNPRNHFRCQVQFYGLSENDEWTQDRAKPVTQIVSAEAWGRASDKTHTCPPCPAPELLGPSVFLFPPKPKDTLMISRTPEVTCVVVDVSHEDPEVKFNWYVDGVEVHNAKTKPREEQYNSTYRVVSVLTVLHQDWLNGKEYKCKVSNKALPAPIEKTISKAKGQPREPQVCTLPPSREEMTKNQVSLSCAVKGFYPSDIAVEWESNGQPENNYKTTPPVLDSDGSFFLVSKLTVDKSRWQQGNVFSCSVMHEALHNRFTQKSLSLSPGK

SEQ ID NO: 133 - protein, 213 aa, Artificial Sequence; identical to SEQ ID NO: 42
  Synthetic

SEQ ID NO: 134 - protein, 201 aa, Artificial Sequence
  Synthetic
EIVLTQSPATLSLSPGERATLSCRASKSVRTGMHWYQQKPGQAPRLLIYGASNLESGIPARFSGSGSGTDFTLTISSLEPEDFAVYYCQQSWNHFTFGQGTKLEIKPDIQNPDPAVYQLRDSKSSDKSVCLFTDFDSQTQVSQSKDSDVYITDKCVLDMRSMDFKSNSAVAWSQKSDFACANAFQNSIIPEDTFFPSPESS

SEQ ID NO: 135 - protein, 450 aa, Artificial Sequence; identical to SEQ ID NO: 67
  Synthetic

SEQ ID NO: 136 - protein, 720 aa, Artificial Sequence
  Synthetic
QVQLVQSGAEVKKPGASVKVSCKASGYTFTSYVMHWVRQKPGQGLEWIGYINPYNEGTESTDKFKGRATMTSDKSTSTVYMELSSLRSEDTAVYYCASIYYGYEGTYFGVWGQGTLVTVSSASTKGPSVFPLAPSSKSTSGGTAALGCLVKDYFPEPVTVSWNSGALTSGVHTFPAVLQSSGLYSLSSVVTVPSSSLGTQTYICNVNHKPSNTKVDKKVEPKSCGGGGSGGGGSGGGGSGGGGSQVQLQESGPGLVKPSETLSLTCTVSGFSLTSYNVHWIRQPPGKGLEWIGVIWSGVRTDYNSVLKPRVTISVDTSKNQFSLKLSSVTAADTAVYYCARGTYDDNYHDVMDAWGQGTLVTVSSDLKNVFPPEVAVFEPSEAEISHTQKATLVCLATGFYPDHVELSWWVNGKEVHSGVCTDPQPLKEQPALQDSRYALSSRLRVSATFWQNPRNHFRCQVQFYGLSENDEWTQDRAKPVTQIVSAEAWGRASDKTHTCPPCPAPELLGPSVFLFPPKPKDTLMISRTPEVTCVVVDVSHEDPEVKFNWYVDGVEVHNAKTKPREEQYNSTYRVVSVLTVLHQDWLNGKEYKCKVSNKALPAPIEKTISKAKGQPREPQVYTLPPSREEMTKNQVSLSCAVKGFYPSDIAVEWESNGQPENNYKTTPPVLDSDGSFFLVSKLTVDKSRWQQGNVFSCSVMHEALHNRFTQKSLSLSPGK

SEQ ID NO: 137 - protein, 213 aa, Artificial Sequence; identical to SEQ ID NO: 42
  Synthetic

SEQ ID NO: 138 - protein, 201 aa, Artificial Sequence; identical to SEQ ID NO: 134
  Synthetic

SEQ ID NO: 139 - protein, 713 aa, Artificial Sequence
  Synthetic
QVQLVQSGAEVKKPGASVKVSCKASGYTFTSYVMHWVRQKPGQGLEWIGYINPYNEGTESTDKFKGRATMTSDKSTSTVYMELSSLRSEDTAVYYCASIYYGYEGTYFGVWGQGTLVTVSSASTKGPSVFPLAPSSKSTSGGTAALGCLVKDYFPEPVTVSWNSGALTSGVHTFPAVLQSSGLYSLSSVVTVPSSSLGTQTYICNVNHKPSNTKVDKKVEPKSCDKTHTCPPCPAPELLGPSVFLFPPKPKDTLMISRTPEVTCVVVDVSHEDPEVKFNWYVDGVEVHNAKTKPREEQYNSTYRVVSVLTVLHQDWLNGKEYKCKVSNKALPAPIEKTISKAKGQPREPQVYTLPPSREEMTKNQVSLTCLVKGFYPSDIAVEWESNGQPENNYKTTPPVLDSDGSFFLYSKLTVDKSRWQQGNVFSCSVMHEALHNHYTQKSLSLSPGGGGGSGGGGSGGGGSGGGGSDIQMTQSPSSLSASVGDRVTITCRASQDISNYLNWYQQKPGKAPKLLIYYTSRLRSGVPSRFSGSGSGTDFTLTISSLQPEDFATYYCQQGHTLPPTFGQGTKVEIKGGGGSGGGGSGGGGSGGGGSEVQLVQSGAEVKKPGASVKVSCKASGYTFTDSYMSWVRQAPGQGLEWIGDMYPDNGDSSYNQKFRERVTITRDTSTSTAYLELSSLRSEDTAVYYCVLAPRWYFSVWGQGTLVTVSS

SEQ ID NO: 140 - protein, 213 aa, Artificial Sequence; identical to SEQ ID NO: 42
  Synthetic

SEQ ID NO: 141 - protein, 450 aa, Artificial Sequence; identical to SEQ ID NO: 63
  Synthetic

SEQ ID NO: 142 - protein, 477 aa, Artificial Sequence
  Synthetic
EIVLTQSPATLSLSPGERATLSCRASSSVSYMHWYQQKPGQAPRPWIYATSNLASGIPARFSGSRSGTDYTLTISSLEPEDFAVYYCQQWSSNTLTFGGGTKVEIKRTVAAPSVFIFPPSDEQLKSGTASVVCLLNNFYPREAKVQWKVDNALQSGNSQESVTEQDSKDSTYSLSSTLTLSKADYEKHKVYACEVTHQGLSSPVTKSFNRGECGGGGSGGGGSGGGGSGGGGSDIQMTQSPSSLSASVGDRVTITCRASQDISNYLNWYQQKPGKAPKLLIYYTSRLRSGVPSRFSGSGSGTDFTLTISSLQPEDFATYYCQQGHTLPPTFGQGTKVEIKGGGGSGGGGSGGGGSGGGGSEVQLVQSGAEVKKPGASVKVSCKASGYTFTDSYMSWVRQAPGQGLEWIGDMYPDNGDSSYNQKFRERVTITRDTSTSTAYLELSSLRSEDTAVYYCVLAPRWYFSVWGQGTLVTVSS

SEQ ID NO: 143 - protein, 714 aa, Artificial Sequence
  Synthetic
DIQMTQSPSSLSASVGDRVTITCRASQDISNYLNWYQQKPGKAPKLLIYYTSRLRSGVPSRFSGSGSGTDFTLTISSLQPEDFATYYCQQGHTLPPTFGQGTKVEIKGGGGSGGGGSGGGGSGGGGSEVQLVQSGAEVKKPGASVKVSCKASGYTFTDSYMSWVRQAPGQGLEWIGDMYPDNGDSSYNQKFRERVTITRDTSTSTAYLELSSLRSEDTAVYYCVLAPRWYFSVWGQGTLVTVSSGGGGSGGGGSGGGGSGGGGSQVQLVQSGAEVKKPGASVKVSCKASGYTFTSYVMHWVRQKPGQGLEWIGYINPYNEGTESTDKFKGRATMTSDKSTSTVYMELSSLRSEDTAVYYCASIYYGYEGTYFGVWGQGTLVTVSSASTKGPSVFPLAPSSKSTSGGTAALGCLVKDYFPEPVTVSWNSGALTSGVHTFPAVLQSSGLYSLSSVVTVPSSSLGTQTYICNVNHKPSNTKVDKKVEPKSCDKTHTCPPCPAPELLGPSVFLFPPKPKDTLMISRTPEVTCVVVDVSHEDPEVKFNWYVDGVEVHNAKTKPREEQYNSTYRVVSVLTVLHQDWLNGKEYKCKVSNKALPAPIEKTISKAKGQPREPQVYTLPPSREEMTKNQVSLTCLVKGFYPSDIAVEWESNGQPENNYKTTPPVLDSDGSFFLYSKLTVDKSRWQQGNVFSCSVMHEALHNHYTQKSLSLSPGK

SEQ ID NO: 144 - protein, 213 aa, Artificial Sequence; identical to SEQ ID NO: 42
  Synthetic

SEQ ID NO: 145 - protein, 450 aa, Artificial Sequence; identical to SEQ ID NO: 67
  Synthetic

SEQ ID NO: 146 - protein, 450 aa, Artificial Sequence
  Synthetic
EVQLVQSGAEVKKPGASVKVSCKASGYTFTDSYMSWVRQAPGQGLEWIGDMYPDNGDSSYNQKFRERVTITRDTSTSTAYLELSSLRSEDTAVYYCVLAPRWYFSVWGQGTLVTVSSASVAAPSVFIFPPSDEQLKSGTASVVCLLNNFYPREAKVQWKVDNALQSGNSQESVTEQDSKDSTYSLSSTLTLSKADYEKHKVYACEVTHQGLSSPVTKSFNRGECDKTHTCPPCPAPELLGPSVFLFPPKPKDTLMISRTPEVTCVVVDVSHEDPEVKFNWYVDGVEVHNAKTKPREEQYNSTYRVVSVLTVLHQDWLNGKEYKCKVSNKALPAPIEKTISKAKGQPREPQVCTLPPSREEMTKNQVSLSCAVKGFYPSDIAVEWESNGQPENNYKTTPPVLDSDGSFFLVSKLTVDKSRWQQGNVFSCSVMHEALHNRFTQKSLSLSPGK

SEQ ID NO: 147 - protein, 213 aa, Artificial Sequence; identical to SEQ ID NO: 42
  Synthetic

SEQ ID NO: 148 - protein, 212 aa, Artificial Sequence
  Synthetic
DIQMTQSPSSLSASVGDRVTITCRASQDISNYLNWYQQKPGKAPKLLIYYTSRLRSGVPSRFSGSGSGTDFTLTISSLQPEDFATYYCQQGHTLPPTFGQGTKVEIKSSASTKGPSVFPLAPSSKSTSGGTAALGCLVKDYFPEPVTVSWNSGALTSGVHTFPAVLQSSGLYSLSSVVTVPSSSLGTQTYICNVNHKPSNTKVDKKVEPKSC

SEQ ID NO: 149 - protein, 450 aa, Artificial Sequence; identical to SEQ ID NO: 71
  Synthetic

SEQ ID NO: 150 - protein, 450 aa, Artificial Sequence
  Synthetic
EVQLVQSGAEVKKPGASVKVSCKASGYTFTDSYMSWVRQAPGQGLEWIGDMYPDNGDSSYNQKFRERVTITRDTSTSTAYLELSSLRSEDTAVYYCVLAPRWYFSVWGQGTLVTVSSASVAAPSVFIFPPSDEQLKSGTASVVCLLNNFYPREAKVQWKVDNALQSGNSQESVTEQDSKDSTYSLSSTLTLSKADYEKHKVYACEVTHQGLSSPVTKSFNRGECDKTHTCPPCPAPELLGPSVFLFPPKPKDTLMISRTPEVTCVVVDVSHEDPEVKFNWYVDGVEVHNAKTKPREEQYNSTYRVVSVLTVLHQDWLNGKEYKCKVSNKALPAPIEKTISKAKGQPREPQVYTKPPSREEMTKNQVSLTCKVKGFYPSDIAVEWESNGQPENNYKTTPPVLDSDGSFFLYSKLTVDKSRWQQGNVFSCSVMHEALHNRFTQKSLSLSPGK

SEQ ID NO: 151 - protein, 213 aa, Artificial Sequence; identical to SEQ ID NO: 42
  Synthetic

SEQ ID NO: 152 - protein, 212 aa, Artificial Sequence; identical to SEQ ID NO: 148
  Synthetic

SEQ ID NO: 153 - protein, 450 aa, Artificial Sequence; identical to SEQ ID NO: 75
  Synthetic

SEQ ID NO: 154 - protein, 450 aa, Artificial Sequence
  Synthetic
EVQLVQSGAEVKKPGASVKVSCKASGYTFTDSYMSWVRQAPGQGLEWIGDMYPDNGDSSYNQKFRERVTITRDTSTSTAYLELSSLRSEDTAVYYCVLAPRWYFSVWGQGTLVTVSSASVAAPSVFIFPPSDEQLKSGTASVVCLLNNFYPREAKVQWKVDNALQSGNSQESVTEQDSKDSTYSLSSTLTLSKADYEKHKVYACEVTHQGLSSPVTKSFNRGECDKTHTCPPCPAPELLGPSVFLFPPKPKDTLMISRTPEVTCVVVDVSHEDPEVKFNWYVDGVEVHNAKTKPREEQYNSTYRVVSVLTVLHQDWLNGKEYKCKVSNKALPAPIEKTISKAKGQPREPQVYVLPPSREEMTKNQVSLLCLVKGFYPSDIAVEWESNGQPENNYLTWPPVLDSDGSFFLYSKLTVDKSRWQQGNVFSCSVMHEALHNRFTQKSLSLSPGK

SEQ ID NO: 155 - protein, 213 aa, Artificial Sequence; identical to SEQ ID NO: 42
  Synthetic

SEQ ID NO: 156 - protein, 212 aa, Artificial Sequence; identical to SEQ ID NO: 148
  Synthetic

SEQ ID NO: 157 - protein, 450 aa, Artificial Sequence; identical to SEQ ID NO: 67
  Synthetic

SEQ ID NO: 158 - protein, 472 aa, Artificial Sequence
  Synthetic
EVQLVQSGAEVKKPGASVKVSCKASGYTFTDSYMSWVRQAPGQGLEWIGDMYPDNGDSSYNQKFRERVTITRDTSTSTAYLELSSLRSEDTAVYYCVLAPRWYFSVWGQGTLVTVSSDLKNVFPPEVAVFEPSEAEISHTQKATLVCLATGFYPDHVELSWWVNGKEVHSGVCTDPQPLKEQPALQDSRYALSSRLRVSATFWQNPRNHFRCQVQFYGLSENDEWTQDRAKPVTQIVSAEAWGRASDKTHTCPPCPAPELLGPSVFLFPPKPKDTLMISRTPEVTCVVVDVSHEDPEVKFNWYVDGVEVHNAKTKPREEQYNSTYRVVSVLTVLHQDWLNGKEYKCKVSNKALPAPIEKTISKAKGQPREPQVCTLPPSREEMTKNQVSLSCAVKGFYPSDIAVEWESNGQPENNYKTTPPVLDSDGSFFLVSKLTVDKSRWQQGNVFSCSVMHEALHNRFTQKSLSLSPGK

SEQ ID NO: 159 - protein, 213 aa, Artificial Sequence; identical to SEQ ID NO: 42
  Synthetic

SEQ ID NO: 160 - protein, 202 aa, Artificial Sequence
  Synthetic
DIQMTQSPSSLSASVGDRVTITCRASQDISNYLNWYQQKPGKAPKLLIYYTSRLRSGVPSRFSGSGSGTDFTLTISSLQPEDFATYYCQQGHTLPPTFGQGTKVEIKPDIQNPDPAVYQLRDSKSSDKSVCLFTDFDSQTQVSQSKDSDVYITDKCVLDMRSMDFKSNSAVAWSQKSDFACANAFQNSIIPEDTFFPSPESS

SEQ ID NO: 161 - protein, 450 aa, Artificial Sequence; identical to SEQ ID NO: 67
  Synthetic

SEQ ID NO: 162 - protein, 716 aa, Artificial Sequence
  Synthetic
QVQLVQSGAEVKKPGASVKVSCKASGYTFTSYVMHWVRQKPGQGLEWIGYINPYNEGTESTDKFKGRATMTSDKSTSTVYMELSSLRSEDTAVYYCASIYYGYEGTYFGVWGQGTLVTVSSASTKGPSVFPLAPSSKSTSGGTAALGCLVKDYFPEPVTVSWNSGALTSGVHTFPAVLQSSGLYSLSSVVTVPSSSLGTQTYICNVNHKPSNTKVDKKVEPKSCGGGGSGGGGSGGGGSGGGGSEVQLVQSGAEVKKPGASVKVSCKASGYTFTDSYMSWVRQAPGQGLEWIGDMYPDNGDSSYNQKFRERVTITRDTSTSTAYLELSSLRSEDTAVYYCVLAPRWYFSVWGQGTLVTVSSDLKNVFPPEVAVFEPSEAEISHTQKATLVCLATGFYPDHVELSWWVNGKEVHSGVCTDPQPLKEQPALQDSRYALSSRLRVSATFWQNPRNHFRCQVQFYGLSENDEWTQDRAKPVTQIVSAEAWGRASDKTHTCPPCPAPELLGPSVFLFPPKPKDTLMISRTPEVTCVVVDVSHEDPEVKFNWYVDGVEVHNAKTKPREEQYNSTYRVVSVLTVLHQDWLNGKEYKCKVSNKALPAPIEKTISKAKGQPREPQVYTLPPSREEMTKNQVSLSCAVKGFYPSDIAVEWESNGQPENNYKTTPPVLDSDGSFFLVSKLTVDKSRWQQGNVFSCSVMHEALHNRFTQKSLSLSPGK

SEQ ID NO: 163 - protein, 213 aa, Artificial Sequence; identical to SEQ ID NO: 42
  Synthetic

SEQ ID NO: 164 - protein, 202 aa, Artificial Sequence; identical to SEQ ID NO: 160
  Synthetic

SEQ ID NO: 165 - protein, 718 aa, Artificial Sequence
  Synthetic
QVQLVQSGAEVKKPGASVKVSCKASGYTFTSYVMHWVRQKPGQGLEWIGYINPYNEGTESTDKFKGRATMTSDKSTSTVYMELSSLRSEDTAVYYCASIYYGYEGTYFGVWGQGTLVTVSSASTKGPSVFPLAPSSKSTSGGTAALGCLVKDYFPEPVTVSWNSGALTSGVHTFPAVLQSSGLYSLSSVVTVPSSSLGTQTYICNVNHKPSNTKVDKKVEPKSCDKTHTCPPCPAPELLGPSVFLFPPKPKDTLMISRTPEVTCVVVDVSHEDPEVKFNWYVDGVEVHNAKTKPREEQYNSTYRVVSVLTVLHQDWLNGKEYKCKVSNKALPAPIEKTISKAKGQPREPQVYTLPPSREEMTKNQVSLTCLVKGFYPSDIAVEWESNGQPENNYKTTPPVLDSDGSFFLYSKLTVDKSRWQQGNVFSCSVMHEALHNHYTQKSLSLSPGGGGGSGGGGSGGGGSGGGGSDIVMTQSPLSLPVTPGEPASISCRSSQSIVYSNGNTYLGWYLQKPGQSPQLLIYKVSNRFSGVPDRFSGSGSGTDFTLKISRVEAEDVGVYYCFQGSHVPYTFGQGTKLEIKGGGGSGGGGSGGGGSGGGGSQVQLVQSGAEVKKPGASVKVSCKASGYTFTNYNMHWVRQAPGQRLEWMGTIYPGNDDTSYNQKFKDRVTITADTSASTAYMELSSLRSEDTAVYYCARGGYRAMDYWGQGTLVTVSS

SEQ ID NO: 166 - protein, 213 aa, Artificial Sequence; identical to SEQ ID NO: 42
  Synthetic

SEQ ID NO: 167 - protein, 718 aa, Artificial Sequence
  Synthetic
QVQLVQSGAEVKKPGASVKVSCKASGYTFTSYVMHWVRQKPGQGLEWIGYINPYNEGTESTDKFKGRATMTSDKSTSTVYMELSSLRSEDTAVYYCASIYYGYEGTYFGVWGQGTLVTVSSASTKGPSVFPLAPSSKSTSGGTAALGCLVKDYFPEPVTVSWNSGALTSGVHTFPAVLQSSGLYSLSSVVTVPSSSLGTQTYICNVNHKPSNTKVDKKVEPKSCDKTHTCPPCPAPELLGPSVFLFPPKPKDTLMISRTPEVTCVVVDVSHEDPEVKFNWYVDGVEVHNAKTKPREEQYNSTYRVVSVLTVLHQDWLNGKEYKCKVSNKALPAPIEKTISKAKGQPREPQVYTLPPSREEMTKNQVSLTCLVKGFYPSDIAVEWESNGQPENNYKTTPPVLDSDGSFFLYSKLTVDKSRWQQGNVFSCSVMHEALHNHYTQKSLSLSPGGGGGSGGGGSGGGGSGGGGSQVQLVQSGAEVKKPGASVKVSCKASGYTFTNYNMHWVRQAPGQRLEWMGTIYPGNDDTSYNQKFKDRVTITADTSASTAYMELSSLRSEDTAVYYCARGGYRAMDYWGQGTLVTVSSGGGGSGGGGSGGGGSGGGGSDIVMTQSPLSLPVTPGEPASISCRSSQSIVYSNGNTYLGWYLQKPGQSPQLLIYKVSNRFSGVPDRFSGSGSGTDFTLKISRVEAEDVGVYYCFQGSHVPYTFGQGTKLEIK

SEQ ID NO: 168 - protein, 213 aa, Artificial Sequence; identical to SEQ ID NO: 42
  Synthetic

SEQ ID NO: 169 - protein, 450 aa, Artificial Sequence; identical to SEQ ID NO: 63
  Synthetic

SEQ ID NO: 170 - protein, 482 aa, Artificial Sequence
  Synthetic
EIVLTQSPATLSLSPGERATLSCRASSSVSYMHWYQQKPGQAPRPWIYATSNLASGIPARFSGSRSGTDYTLTISSLEPEDFAVYYCQQWSSNTLTFGGGTKVEIKRTVAAPSVFIFPPSDEQLKSGTASVVCLLNNFYPREAKVQWKVDNALQSGNSQESVTEQDSKDSTYSLSSTLTLSKADYEKHKVYACEVTHQGLSSPVTKSFNRGECGGGGSGGGGSGGGGSGGGGSDIVMTQSPLSLPVTPGEPASISCRSSQSIVYSNGNTYLGWYLQKPGQSPQLLIYKVSNRFSGVPDRFSGSGSGTDFTLKISRVEAEDVGVYYCFQGSHVPYTFGQGTKLEIKGGGGSGGGGSGGGGSGGGGSQVQLVQSGAEVKKPGASVKVSCKASGYTFTNYNMHWVRQAPGQRLEWMGTIYPGNDDTSYNQKFKDRVTITADTSASTAYMELSSLRSEDTAVYYCARGGYRAMDYWGQGTLVTVSS

SEQ ID NO: 171 - protein, 450 aa, Artificial Sequence; identical to SEQ ID NO: 63
  Synthetic

SEQ ID NO: 172 - protein, 482 aa, Artificial Sequence
  Synthetic
EIVLTQSPATLSLSPGERATLSCRASSSVSYMHWYQQKPGQAPRPWIYATSNLASGIPARFSGSRSGTDYTLTISSLEPEDFAVYYCQQWSSNTLTFGGGTKVEIKRTVAAPSVFIFPPSDEQLKSGTASVVCLLNNFYPREAKVQWKVDNALQSGNSQESVTEQDSKDSTYSLSSTLTLSKADYEKHKVYACEVTHQGLSSPVTKSFNRGECGGGGSGGGGSGGGGSGGGGSQVQLVQSGAEVKKPGASVKVSCKASGYTFTNYNMHWVRQAPGQRLEWMGTIYPGNDDTSYNQKFKDRVTITADTSASTAYMELSSLRSEDTAVYYCARGGYRAMDYWGQGTLVTVSSGGGGSGGGGSGGGGSGGGGSDIVMTQSPLSLPVTPGEPASISCRSSQSIVYSNGNTYLGWYLQKPGQSPQLLIYKVSNRFSGVPDRFSGSGSGTDFTLKISRVEAEDVGVYYCFQGSHVPYTFGQGTKLEIK

SEQ ID NO: 173 - protein, 719 aa, Artificial Sequence
  Synthetic
DIVMTQSPLSLPVTPGEPASISCRSSQSIVYSNGNTYLGWYLQKPGQSPQLLIYKVSNRFSGVPDRFSGSGSGTDFTLKISRVEAEDVGVYYCFQGSHVPYTFGQGTKLEIKGGGGSGGGGSGGGGSGGGGSQVQLVQSGAEVKKPGASVKVSCKASGYTFTNYNMHWVRQAPGQRLEWMGTIYPGNDDTSYNQKFKDRVTITADTSASTAYMELSSLRSEDTAVYYCARGGYRAMDYWGQGTLVTVSSGGGGSGGGGSGGGGSGGGGSQVQLVQSGAEVKKPGASVKVSCKASGYTFTSYVMHWVRQKPGQGLEWIGYINPYNEGTESTDKFKGRATMTSDKSTSTVYMELSSLRSEDTAVYYCASIYYGYEGTYFGVWGQGTLVTVSSASTKGPSVFPLAPSSKSTSGGTAALGCLVKDYFPEPVTVSWNSGALTSGVHTFPAVLQSSGLYSLSSVVTVPSSSLGTQTYICNVNHKPSNTKVDKKVEPKSCDKTHTCPPCPAPELLGPSVFLFPPKPKDTLMISRTPEVTCVVVDVSHEDPEVKFNWYVDGVEVHNAKTKPREEQYNSTYRVVSVLTVLHQDWLNGKEYKCKVSNKALPAPIEKTISKAKGQPREPQVYTLPPSREEMTKNQVSLTCLVKGFYPSDIAVEWESNGQPENNYKTTPPVLDSDGSFFLYSKLTVDKSRWQQGNVFSCSVMHEALHNHYTQKSLSLSPGK

SEQ ID NO: 174 - protein, 213 aa, Artificial Sequence; identical to SEQ ID NO: 42
  Synthetic

SEQ ID NO: 175 - protein, 719 aa, Artificial Sequence
  Synthetic
QVQLVQSGAEVKKPGASVKVSCKASGYTFTNYNMHWVRQAPGQRLEWMGTIYPGNDDTSYNQKFKDRVTITADTSASTAYMELSSLRSEDTAVYYCARGGYRAMDYWGQGTLVTVSSGGGGSGGGGSGGGGSGGGGSDIVMTQSPLSLPVTPGEPASISCRSSQSIVYSNGNTYLGWYLQKPGQSPQLLIYKVSNRFSGVPDRFSGSGSGTDFTLKISRVEAEDVGVYYCFQGSHVPYTFGQGTKLEIKGGGGSGGGGSGGGGSGGGGSQVQLVQSGAEVKKPGASVKVSCKASGYTFTSYVMHWVRQKPGQGLEWIGYINPYNEGTESTDKFKGRATMTSDKSTSTVYMELSSLRSEDTAVYYCASIYYGYEGTYFGVWGQGTLVTVSSASTKGPSVFPLAPSSKSTSGGTAALGCLVKDYFPEPVTVSWNSGALTSGVHTFPAVLQSSGLYSLSSVVTVPSSSLGTQTYICNVNHKPSNTKVDKKVEPKSCDKTHTCPPCPAPELLGPSVFLFPPKPKDTLMISRTPEVTCVVVDVSHEDPEVKFNWYVDGVEVHNAKTKPREEQYNSTYRVVSVLTVLHQDWLNGKEYKCKVSNKALPAPIEKTISKAKGQPREPQVYTLPPSREEMTKNQVSLTCLVKGFYPSDIAVEWESNGQPENNYKTTPPVLDSDGSFFLYSKLTVDKSRWQQGNVFSCSVMHEALHNHYTQKSLSLSPGK

SEQ ID NO: 176 - protein, 213 aa, Artificial Sequence; identical to SEQ ID NO: 42
  Synthetic

SEQ ID NO: 177 - protein, 450 aa, Artificial Sequence; identical to SEQ ID NO: 67
  Synthetic

SEQ ID NO: 178 - protein, 450 aa, Artificial Sequence
  Synthetic
QVQLVQSGAEVKKPGASVKVSCKASGYTFTNYNMHWVRQAPGQRLEWMGTIYPGNDDTSYNQKFKDRVTITADTSASTAYMELSSLRSEDTAVYYCARGGYRAMDYWGQGTLVTVSSASVAAPSVFIFPPSDEQLKSGTASVVCLLNNFYPREAKVQWKVDNALQSGNSQESVTEQDSKDSTYSLSSTLTLSKADYEKHKVYACEVTHQGLSSPVTKSFNRGECDKTHTCPPCPAPELLGPSVFLFPPKPKDTLMISRTPEVTCVVVDVSHEDPEVKFNWYVDGVEVHNAKTKPREEQYNSTYRVVSVLTVLHQDWLNGKEYKCKVSNKALPAPIEKTISKAKGQPREPQVCTLPPSREEMTKNQVSLSCAVKGFYPSDIAVEWESNGQPENNYKTTPPVLDSDGSFFLVSKLTVDKSRWQQGNVFSCSVMHEALHNRFTQKSLSLSPGK

SEQ ID NO: 179 - protein, 213 aa, Artificial Sequence; identical to SEQ ID NO: 42
  Synthetic

SEQ ID NO: 180 - protein, 217 aa, Artificial Sequence
  Synthetic
DIVMTQSPLSLPVTPGEPASISCRSSQSIVYSNGNTYLGWYLQKPGQSPQLLIYKVSNRFSGVPDRFSGSGSGTDFTLKISRVEAEDVGVYYCFQGSHVPYTFGQGTKLEIKSSASTKGPSVFPLAPSSKSTSGGTAALGCLVKDYFPEPVTVSWNSGALTSGVHTFPAVLQSSGLYSLSSVVTVPSSSLGTQTYICNVNHKPSNTKVDKKVEPKSC

SEQ ID NO: 181 - protein, 450 aa, Artificial Sequence; identical to SEQ ID NO: 71
  Synthetic

SEQ ID NO: 182 - protein, 450 aa, Artificial Sequence
  Synthetic
QVQLVQSGAEVKKPGASVKVSCKASGYTFTNYNMHWVRQAPGQRLEWMGTIYPGNDDTSYNQKFKDRVTITADTSASTAYMELSSLRSEDTAVYYCARGGYRAMDYWGQGTLVTVSSASVAAPSVFIFPPSDEQLKSGTASVVCLLNNFYPREAKVQWKVDNALQSGNSQESVTEQDSKDSTYSLSSTLTLSKADYEKHKVYACEVTHQGLSSPVTKSFNRGECDKTHTCPPCPAPELLGPSVFLFPPKPKDTLMISRTPEVTCVVVDVSHEDPEVKFNWYVDGVEVHNAKTKPREEQYNSTYRVVSVLTVLHQDWLNGKEYKCKVSNKALPAPIEKTISKAKGQPREPQVYTKPPSREEMTKNQVSLTCKVKGFYPSDIAVEWESNGQPENNYKTTPPVLDSDGSFFLYSKLTVDKSRWQQGNVFSCSVMHEALHNRFTQKSLSLSPGK

SEQ ID NO: 183 - protein, 213 aa, Artificial Sequence; identical to SEQ ID NO: 42
  Synthetic

SEQ ID NO: 184 - protein, 217 aa, Artificial Sequence; identical to SEQ ID NO: 180
  Synthetic

SEQ ID NO: 185 - protein, 450 aa, Artificial Sequence; identical to SEQ ID NO: 75
  Synthetic

SEQ ID NO: 186 - protein, 450 aa, Artificial Sequence
  Synthetic
QVQLVQSGAEVKKPGASVKVSCKASGYTFTNYNMHWVRQAPGQRLEWMGTIYPGNDDTSYNQKFKDRVTITADTSASTAYMELSSLRSEDTAVYYCARGGYRAMDYWGQGTLVTVSSASVAAPSVFIFPPSDEQLKSGTASVVCLLNNFYPREAKVQWKVDNALQSGNSQESVTEQDSKDSTYSLSSTLTLSKADYEKHKVYACEVTHQGLSSPVTKSFNRGECDKTHTCPPCPAPELLGPSVFLFPPKPKDTLMISRTPEVTCVVVDVSHEDPEVKFNWYVDGVEVHNAKTKPREEQYNSTYRVVSVLTVLHQDWLNGKEYKCKVSNKALPAPIEKTISKAKGQPREPQVYVLPPSREEMTKNQVSLLCLVKGFYPSDIAVEWESNGQPENNYLTWPPVLDSDGSFFLYSKLTVDKSRWQQGNVFSCSVMHEALHNRFTQKSLSLSPGK

SEQ ID NO: 187 - protein, 213 aa, Artificial Sequence; identical to SEQ ID NO: 42
  Synthetic

SEQ ID NO: 188 - protein, 217 aa, Artificial Sequence; identical to SEQ ID NO: 180
  Synthetic

SEQ ID NO: 189 - protein, 450 aa, Artificial Sequence; identical to SEQ ID NO: 67
  Synthetic

SEQ ID NO: 190 - protein, 472 aa, Artificial Sequence
  Synthetic
QVQLVQSGAEVKKPGASVKVSCKASGYTFTNYNMHWVRQAPGQRLEWMGTIYPGNDDTSYNQKFKDRVTITADTSASTAYMELSSLRSEDTAVYYCARGGYRAMDYWGQGTLVTVSSDLKNVFPPEVAVFEPSEAEISHTQKATLVCLATGFYPDHVELSWWVNGKEVHSGVCTDPQPLKEQPALQDSRYALSSRLRVSATFWQNPRNHFRCQVQFYGLSENDEWTQDRAKPVTQIVSAEAWGRASDKTHTCPPCPAPELLGPSVFLFPPKPKDTLMISRTPEVTCVVVDVSHEDPEVKFNWYVDGVEVHNAKTKPREEQYNSTYRVVSVLTVLHQDWLNGKEYKCKVSNKALPAPIEKTISKAKGQPREPQVCTLPPSREEMTKNQVSLSCAVKGFYPSDIAVEWESNGQPENNYKTTPPVLDSDGSFFLVSKLTVDKSRWQQGNVFSCSVMHEALHNRFTQKSLSLSPGK

SEQ ID NO: 191 - protein, 213 aa, Artificial Sequence; identical to SEQ ID NO: 42
  Synthetic

SEQ ID NO: 192 - protein, 207 aa, Artificial Sequence
  Synthetic
DIVMTQSPLSLPVTPGEPASISCRSSQSIVYSNGNTYLGWYLQKPGQSPQLLIYKVSNRFSGVPDRFSGSGSGTDFTLKISRVEAEDVGVYYCFQGSHVPYTFGQGTKLEIKPDIQNPDPAVYQLRDSKSSDKSVCLFTDFDSQTQVSQSKDSDVYITDKCVLDMRSMDFKSNSAVAWSQKSDFACANAFQNSIIPEDTFFPSPESS

SEQ ID NO: 193 - protein, 450 aa, Artificial Sequence; identical to SEQ ID NO: 67
  Synthetic

SEQ ID NO: 194 - protein, 716 aa, Artificial Sequence
  Synthetic
QVQLVQSGAEVKKPGASVKVSCKASGYTFTSYVMHWVRQKPGQGLEWIGYINPYNEGTESTDKFKGRATMTSDKSTSTVYMELSSLRSEDTAVYYCASIYYGYEGTYFGVWGQGTLVTVSSASTKGPSVFPLAPSSKSTSGGTAALGCLVKDYFPEPVTVSWNSGALTSGVHTFPAVLQSSGLYSLSSVVTVPSSSLGTQTYICNVNHKPSNTKVDKKVEPKSCGGGGSGGGGSGGGGSGGGGSQVQLVQSGAEVKKPGASVKVSCKASGYTFTNYNMHWVRQAPGQRLEWMGTIYPGNDDTSYNQKFKDRVTITADTSASTAYMELSSLRSEDTAVYYCARGGYRAMDYWGQGTLVTVSSDLKNVFPPEVAVFEPSEAEISHTQKATLVCLATGFYPDHVELSWWVNGKEVHSGVCTDPQPLKEQPALQDSRYALSSRLRVSATFWQNPRNHFRCQVQFYGLSENDEWTQDRAKPVTQIVSAEAWGRASDKTHTCPPCPAPELLGPSVFLFPPKPKDTLMISRTPEVTCVVVDVSHEDPEVKFNWYVDGVEVHNAKTKPREEQYNSTYRVVSVLTVLHQDWLNGKEYKCKVSNKALPAPIEKTISKAKGQPREPQVYTLPPSREEMTKNQVSLSCAVKGFYPSDIAVEWESNGQPENNYKTTPPVLDSDGSFFLVSKLTVDKSRWQQGNVFSCSVMHEALHNRFTQKSLSLSPGK

SEQ ID NO: 195 - protein, 213 aa, Artificial Sequence; identical to SEQ ID NO: 42
  Synthetic

SEQ ID NO: 196 - protein, 207 aa, Artificial Sequence; identical to SEQ ID NO: 192
  Synthetic

SEQ ID NO: 197 - protein, 720 aa, Artificial Sequence
  Synthetic
QVQLVQSGAEVKKPGASVKVSCKASGYTFTSYVMHWVRQKPGQGLEWIGYINPYNEGTESTDKFKGRATMTSDKSTSTVYMELSSLRSEDTAVYYCASIYYGYEGTYFGVWGQGTLVTVSSASTKGPSVFPLAPSSKSTSGGTAALGCLVKDYFPEPVTVSWNSGALTSGVHTFPAVLQSSGLYSLSSVVTVPSSSLGTQTYICNVNHKPSNTKVDKKVEPKSCDKTHTCPPCPAPELLGPSVFLFPPKPKDTLMISRTPEVTCVVVDVSHEDPEVKFNWYVDGVEVHNAKTKPREEQYNSTYRVVSVLTVLHQDWLNGKEYKCKVSNKALPAPIEKTISKAKGQPREPQVYTLPPSREEMTKNQVSLTCLVKGFYPSDIAVEWESNGQPENNYKTTPPVLDSDGSFFLYSKLTVDKSRWQQGNVFSCSVMHEALHNHYTQKSLSLSPGGGGGSGGGGSGGGGSGGGGSDIVMTQSPDSLAVSLGERATINCKSSQSVLYSSNNRNYLAWYQQKPGQPPKLLINQASTRASGVPDRFSGSGSGTEFTLIISSLHAEDVAIYYCQQYYTPPLAFGGGTKLEIKGGGGSGGGGSGGGGSGGGGSKVQLVESGGGLVKPGGSLRLSCAASGFTFSNAWMNWVRQAPGKGLEWVGRIKRKTDGETTDYAAPVKGRFSISRDDSKNTLYLQMNSLKTEDTAVYYCAGSNRAFDIWGQGTMVTVSA

SEQ ID NO: 198 - protein, 213 aa, Artificial Sequence; identical to SEQ ID NO: 42
  Synthetic

SEQ ID NO: 199 - protein, 720 aa, Artificial Sequence
  Synthetic
QVQLVQSGAEVKKPGASVKVSCKASGYTFTSYVMHWVRQKPGQGLEWIGYINPYNEGTESTDKFKGRATMTSDKSTSTVYMELSSLRSEDTAVYYCASIYYGYEGTYFGVWGQGTLVTVSSASTKGPSVFPLAPSSKSTSGGTAALGCLVKDYFPEPVTVSWNSGALTSGVHTFPAVLQSSGLYSLSSVVTVPSSSLGTQTYICNVNHKPSNTKVDKKVEPKSCDKTHTCPPCPAPELLGPSVFLFPPKPKDTLMISRTPEVTCVVVDVSHEDPEVKFNWYVDGVEVHNAKTKPREEQYNSTYRVVSVLTVLHQDWLNGKEYKCKVSNKALPAPIEKTISKAKGQPREPQVYTLPPSREEMTKNQVSLTCLVKGFYPSDIAVEWESNGQPENNYKTTPPVLDSDGSFFLYSKLTVDKSRWQQGNVFSCSVMHEALHNHYTQKSLSLSPGGGGGSGGGGSGGGGSGGGGSKVQLVESGGGLVKPGGSLRLSCAASGFTFSNAWMNWVRQAPGKGLEWVGRIKRKTDGETTDYAAPVKGRFSISRDDSKNTLYLQMNSLKTEDTAVYYCAGSNRAFDIWGQGTMVTVSAGGGGSGGGGSGGGGSGGGGSDIVMTQSPDSLAVSLGERATINCKSSQSVLYSSNNRNYLAWYQQKPGQPPKLLINQASTRASGVPDRFSGSGSGTEFTLIISSLHAEDVAIYYCQQYYTPPLAFGGGTKLEIK

SEQ ID NO: 200 - protein, 213 aa, Artificial Sequence; identical to SEQ ID NO: 42
  Synthetic

SEQ ID NO: 201 - protein, 450 aa, Artificial Sequence; identical to SEQ ID NO: 63
  Synthetic

SEQ ID NO: 202 - protein, 484 aa, Artificial Sequence
  Synthetic
EIVLTQSPATLSLSPGERATLSCRASSSVSYMHWYQQKPGQAPRPWIYATSNLASGIPARFSGSRSGTDYTLTISSLEPEDFAVYYCQQWSSNTLTFGGGTKVEIKRTVAAPSVFIFPPSDEQLKSGTASVVCLLNNFYPREAKVQWKVDNALQSGNSQESVTEQDSKDSTYSLSSTLTLSKADYEKHKVYACEVTHQGLSSPVTKSFNRGECGGGGSGGGGSGGGGSGGGGSDIVMTQSPDSLAVSLGERATINCKSSQSVLYSSNNRNYLAWYQQKPGQPPKLLINQASTRASGVPDRFSGSGSGTEFTLIISSLHAEDVAIYYCQQYYTPPLAFGGGTKLEIKGGGGSGGGGSGGGGSGGGGSKVQLVESGGGLVKPGGSLRLSCAASGFTFSNAWMNWVRQAPGKGLEWVGRIKRKTDGETTDYAAPVKGRFSISRDDSKNTLYLQMNSLKTEDTAVYYCAGSNRAFDIWGQGTMVTVSA

SEQ ID NO: 203 - protein, 450 aa, Artificial Sequence; identical to SEQ ID NO: 63
  Synthetic

SEQ ID NO: 204 - protein, 484 aa, Artificial Sequence
  Synthetic
EIVLTQSPATLSLSPGERATLSCRASSSVSYMHWYQQKPGQAPRPWIYATSNLASGIPARFSGSRSGTDYTLTISSLEPEDFAVYYCQQWSSNTLTFGGGTKVEIKRTVAAPSVFIFPPSDEQLKSGTASVVCLLNNFYPREAKVQWKVDNALQSGNSQESVTEQDSKDSTYSLSSTLTLSKADYEKHKVYACEVTHQGLSSPVTKSFNRGECGGGGSGGGGSGGGGSGGGGSKVQLVESGGGLVKPGGSLRLSCAASGFTFSNAWMNWVRQAPGKGLEWVGRIKRKTDGETTDYAAPVKGRFSISRDDSKNTLYLQMNSLKTEDTAVYYCAGSNRAFDIWGQGTMVTVSAGGGGSGGGGSGGGGSGGGGSDIVMTQSPDSLAVSLGERATINCKSSQSVLYSSNNRNYLAWYQQKPGQPPKLLINQASTRASGVPDRFSGSGSGTEFTLIISSLHAEDVAIYYCQQYYTPPLAFGGGTKLEIK

SEQ ID NO: 205 - protein, 721 aa, Artificial Sequence
  Synthetic
DIVMTQSPDSLAVSLGERATINCKSSQSVLYSSNNRNYLAWYQQKPGQPPKLLINQASTRASGVPDRFSGSGSGTEFTLIISSLHAEDVAIYYCQQYYTPPLAFGGGTKLEIKGGGGSGGGGSGGGGSGGGGSKVQLVESGGGLVKPGGSLRLSCAASGFTFSNAWMNWVRQAPGKGLEWVGRIKRKTDGETTDYAAPVKGRFSISRDDSKNTLYLQMNSLKTEDTAVYYCAGSNRAFDIWGQGTMVTVSAGGGGSGGGGSGGGGSGGGGSQVQLVQSGAEVKKPGASVKVSCKASGYTFTSYVMHWVRQKPGQGLEWIGYINPYNEGTESTDKFKGRATMTSDKSTSTVYMELSSLRSEDTAVYYCASIYYGYEGTYFGVWGQGTLVTVSSASTKGPSVFPLAPSSKSTSGGTAALGCLVKDYFPEPVTVSWNSGALTSGVHTFPAVLQSSGLYSLSSVVTVPSSSLGTQTYICNVNHKPSNTKVDKKVEPKSCDKTHTCPPCPAPELLGPSVFLFPPKPKDTLMISRTPEVTCVVVDVSHEDPEVKFNWYVDGVEVHNAKTKPREEQYNSTYRVVSVLTVLHQDWLNGKEYKCKVSNKALPAPIEKTISKAKGQPREPQVYTLPPSREEMTKNQVSLTCLVKGFYPSDIAVEWESNGQPENNYKTTPPVLDSDGSFFLYSKLTVDKSRWQQGNVFSCSVMHEALHNHYTQKSLSLSPGK

SEQ ID NO: 206 - protein, 213 aa, Artificial Sequence; identical to SEQ ID NO: 42
  Synthetic

SEQ ID NO: 207 - protein, 721 aa, Artificial Sequence
  Synthetic
KVQLVESGGGLVKPGGSLRLSCAASGFTFSNAWMNWVRQAPGKGLEWVGRIKRKTDGETTDYAAPVKGRFSISRDDSKNTLYLQMNSLKTEDTAVYYCAGSNRAFDIWGQGTMVTVSAGGGGSGGGGSGGGGSGGGGSDIVMTQSPDSLAVSLGERATINCKSSQSVLYSSNNRNYLAWYQQKPGQPPKLLINQASTRASGVPDRFSGSGSGTEFTLIISSLHAEDVAIYYCQQYYTPPLAFGGGTKLEIKGGGGSGGGGSGGGGSGGGGSQVQLVQSGAEVKKPGASVKVSCKASGYTFTSYVMHWVRQKPGQGLEWIGYINPYNEGTESTDKFKGRATMTSDKSTSTVYMELSSLRSEDTAVYYCASIYYGYEGTYFGVWGQGTLVTVSSASTKGPSVFPLAPSSKSTSGGTAALGCLVKDYFPEPVTVSWNSGALTSGVHTFPAVLQSSGLYSLSSVVTVPSSSLGTQTYICNVNHKPSNTKVDKKVEPKSCDKTHTCPPCPAPELLGPSVFLFPPKPKDTLMISRTPEVTCVVVDVSHEDPEVKFNWYVDGVEVHNAKTKPREEQYNSTYRVVSVLTVLHQDWLNGKEYKCKVSNKALPAPIEKTISKAKGQPREPQVYTLPPSREEMTKNQVSLTCLVKGFYPSDIAVEWESNGQPENNYKTTPPVLDSDGSFFLYSKLTVDKSRWQQGNVFSCSVMHEALHNHYTQKSLSLSPGK

SEQ ID NO: 208 - protein, 213 aa, Artificial Sequence; identical to SEQ ID NO: 42
  Synthetic

SEQ ID NO: 209 - protein, 450 aa, Artificial Sequence; identical to SEQ ID NO: 67
  Synthetic

SEQ ID NO: 210 - protein, 451 aa, Artificial Sequence
  Synthetic
KVQLVESGGGLVKPGGSLRLSCAASGFTFSNAWMNWVRQAPGKGLEWVGRIKRKTDGETTDYAAPVKGRFSISRDDSKNTLYLQMNSLKTEDTAVYYCAGSNRAFDIWGQGTMVTVSAASVAAPSVFIFPPSDEQLKSGTASVVCLLNNFYPREAKVQWKVDNALQSGNSQESVTEQDSKDSTYSLSSTLTLSKADYEKHKVYACEVTHQGLSSPVTKSFNRGECDKTHTCPPCPAPELLGPSVFLFPPKPKDTLMISRTPEVTCVVVDVSHEDPEVKFNWYVDGVEVHNAKTKPREEQYNSTYRVVSVLTVLHQDWLNGKEYKCKVSNKALPAPIEKTISKAKGQPREPQVCTLPPSREEMTKNQVSLSCAVKGFYPSDIAVEWESNGQPENNYKTTPPVLDSDGSFFLVSKLTVDKSRWQQGNVFSCSVMHEALHNRFTQKSLSLSPGK

SEQ ID NO: 211 - protein, 213 aa, Artificial Sequence; identical to SEQ ID NO: 42
  Synthetic

SEQ ID NO: 212 - protein, 218 aa, Artificial Sequence
  Synthetic
DIVMTQSPDSLAVSLGERATINCKSSQSVLYSSNNRNYLAWYQQKPGQPPKLLINQASTRASGVPDRFSGSGSGTEFTLIISSLHAEDVAIYYCQQYYTPPLAFGGGTKLEIKSSASTKGPSVFPLAPSSKSTSGGTAALGCLVKDYFPEPVTVSWNSGALTSGVHTFPAVLQSSGLYSLSSVVTVPSSSLGTQTYICNVNHKPSNTKVDKKVEPKSC

SEQ ID NO: 213 - protein, 450 aa, Artificial Sequence; identical to SEQ ID NO: 71
  Synthetic

SEQ ID NO: 214 - protein, 451 aa, Artificial Sequence
  Synthetic
KVQLVESGGGLVKPGGSLRLSCAASGFTFSNAWMNWVRQAPGKGLEWVGRIKRKTDGETTDYAAPVKGRFSISRDDSKNTLYLQMNSLKTEDTAVYYCAGSNRAFDIWGQGTMVTVSAASVAAPSVFIFPPSDEQLKSGTASVVCLLNNFYPREAKVQWKVDNALQSGNSQESVTEQDSKDSTYSLSSTLTLSKADYEKHKVYACEVTHQGLSSPVTKSFNRGECDKTHTCPPCPAPELLGPSVFLFPPKPKDTLMISRTPEVTCVVVDVSHEDPEVKFNWYVDGVEVHNAKTKPREEQYNSTYRVVSVLTVLHQDWLNGKEYKCKVSNKALPAPIEKTISKAKGQPREPQVYTKPPSREEMTKNQVSLTCKVKGFYPSDIAVEWESNGQPENNYKTTPPVLDSDGSFFLYSKLTVDKSRWQQGNVFSCSVMHEALHNRFTQKSLSLSPGK

SEQ ID NO: 215 - protein, 213 aa, Artificial Sequence; identical to SEQ ID NO: 42
  Synthetic

SEQ ID NO: 216 - protein, 218 aa, Artificial Sequence; identical to SEQ ID NO: 212
  Synthetic

SEQ ID NO: 217 - protein, 450 aa, Artificial Sequence; identical to SEQ ID NO: 75
  Synthetic

SEQ ID NO: 218 - protein, 451 aa, Artificial Sequence
  Synthetic
KVQLVESGGGLVKPGGSLRLSCAASGFTFSNAWMNWVRQAPGKGLEWVGRIKRKTDGETTDYAAPVKGRFSISRDDSKNTLYLQMNSLKTEDTAVYYCAGSNRAFDIWGQGTMVTVSAASVAAPSVFIFPPSDEQLKSGTASVVCLLNNFYPREAKVQWKVDNALQSGNSQESVTEQDSKDSTYSLSSTLTLSKADYEKHKVYACEVTHQGLSSPVTKSFNRGECDKTHTCPPCPAPELLGPSVFLFPPKPKDTLMISRTPEVTCVVVDVSHEDPEVKFNWYVDGVEVHNAKTKPREEQYNSTYRVVSVLTVLHQDWLNGKEYKCKVSNKALPAPIEKTISKAKGQPREPQVYVLPPSREEMTKNQVSLLCLVKGFYPSDIAVEWESNGQPENNYLTWPPVLDSDGSFFLYSKLTVDKSRWQQGNVFSCSVMHEALHNRFTQKSLSLSPGK

SEQ ID NO: 219 - protein, 213 aa, Artificial Sequence; identical to SEQ ID NO: 42
  Synthetic

SEQ ID NO: 220 - protein, 218 aa, Artificial Sequence; identical to SEQ ID NO: 212
  Synthetic

SEQ ID NO: 221 - protein, 450 aa, Artificial Sequence; identical to SEQ ID NO: 67
  Synthetic

SEQ ID NO: 222 - protein, 473 aa, Artificial Sequence
  Synthetic
KVQLVESGGGLVKPGGSLRLSCAASGFTFSNAWMNWVRQAPGKGLEWVGRIKRKTDGETTDYAAPVKGRFSISRDDSKNTLYLQMNSLKTEDTAVYYCAGSNRAFDIWGQGTMVTVSADLKNVFPPEVAVFEPSEAEISHTQKATLVCLATGFYPDHVELSWWVNGKEVHSGVCTDPQPLKEQPALQDSRYALSSRLRVSATFWQNPRNHFRCQVQFYGLSENDEWTQDRAKPVTQIVSAEAWGRASDKTHTCPPCPAPELLGPSVFLFPPKPKDTLMISRTPEVTCVVVDVSHEDPEVKFNWYVDGVEVHNAKTKPREEQYNSTYRVVSVLTVLHQDWLNGKEYKCKVSNKALPAPIEKTISKAKGQPREPQVCTLPPSREEMTKNQVSLSCAVKGFYPSDIAVEWESNGQPENNYKTTPPVLDSDGSFFLVSKLTVDKSRWQQGNVFSCSVMHEALHNRFTQKSLSLSPGK

SEQ ID NO: 223 - protein, 213 aa, Artificial Sequence; identical to SEQ ID NO: 42
  Synthetic

SEQ ID NO: 224 - protein, 208 aa, Artificial Sequence
  Synthetic
DIVMTQSPDSLAVSLGERATINCKSSQSVLYSSNNRNYLAWYQQKPGQPPKLLINQASTRASGVPDRFSGSGSGTEFTLIISSLHAEDVAIYYCQQYYTPPLAFGGGTKLEIKPDIQNPDPAVYQLRDSKSSDKSVCLFTDFDSQTQVSQSKDSDVYITDKCVLDMRSMDFKSNSAVAWSQKSDFACANAFQNSIIPEDTFFPSPESS

SEQ ID NO: 225 - protein, 450 aa, Artificial Sequence; identical to SEQ ID NO: 67
  Synthetic

SEQ ID NO: 226 - protein, 717 aa, Artificial Sequence
  Synthetic
QVQLVQSGAEVKKPGASVKVSCKASGYTFTSYVMHWVRQKPGQGLEWIGYINPYNEGTESTDKFKGRATMTSDKSTSTVYMELSSLRSEDTAVYYCASIYYGYEGTYFGVWGQGTLVTVSSASTKGPSVFPLAPSSKSTSGGTAALGCLVKDYFPEPVTVSWNSGALTSGVHTFPAVLQSSGLYSLSSVVTVPSSSLGTQTYICNVNHKPSNTKVDKKVEPKSCGGGGSGGGGSGGGGSGGGGSKVQLVESGGGLVKPGGSLRLSCAASGFTFSNAWMNWVRQAPGKGLEWVGRIKRKTDGETTDYAAPVKGRFSISRDDSKNTLYLQMNSLKTEDTAVYYCAGSNRAFDIWGQGTMVTVSADLKNVFPPEVAVFEPSEAEISHTQKATLVCLATGFYPDHVELSWWVNGKEVHSGVCTDPQPLKEQPALQDSRYALSSRLRVSATFWQNPRNHFRCQVQFYGLSENDEWTQDRAKPVTQIVSAEAWGRASDKTHTCPPCPAPELLGPSVFLFPPKPKDTLMISRTPEVTCVVVDVSHEDPEVKFNWYVDGVEVHNAKTKPREEQYNSTYRVVSVLTVLHQDWLNGKEYKCKVSNKALPAPIEKTISKAKGQPREPQVYTLPPSREEMTKNQVSLSCAVKGFYPSDIAVEWESNGQPENNYKTTPPVLDSDGSFFLVSKLTVDKSRWQQGNVFSCSVMHEALHNRFTQKSLSLSPGK

SEQ ID NO: 227 - protein, 213 aa, Artificial Sequence; identical to SEQ ID NO: 42
  Synthetic

SEQ ID NO: 228 - protein, 208 aa, Artificial Sequence; identical to SEQ ID NO: 224
  Synthetic

SEQ ID NO: 229 - protein, 450 aa, Artificial Sequence
  Synthetic
QVQLVQSGAEVKKPGASVKVSCKASGYTFTSYVMHWVRQKPGQGLEWIGYINPYNEGTESTDKFKGRATMTSDKSTSTVYMELSSLRSEDTAVYYCASIYYGYEGTYFGVWGQGTLVTVSSASTKGPSVFPLAPSSKSTSGGTAALGCLVKDYFPEPVTVSWNSGALTSGVHTFPAVLQSSGLYSLSSVVTVPSSSLGTQTYICNVNHKPSNTKVDKKVEPKSCDKTHTCPPCPAPEAAGPSVFLFPPKPKDTLMISRTPEVTCVVVDVSHEDPEVKFNWYVDGVEVHNAKTKPREEQYNSTYRVVSVLTVLHQDWLNGKEYKCKVSNKALPAPIEKTISKAKGQPREPQVYTLPPSREEMTKNQVSLWCLVKGFYPSDIAVEWESNGQPENNYKTTPPVLDSDGSFFLYSKLTVDKSRWQQGNVFSCSVMHEALHNHYTQKSLSLSPGK

SEQ ID NO: 230 - protein, 702 aa, Artificial Sequence
  Synthetic
QVQLVQSGAEVKKPGASVKVSCKASGYTFTSYVMHWVRQKPGQGLEWIGYINPYNEGTESTDKFKGRATMTSDKSTSTVYMELSSLRSEDTAVYYCASIYYGYEGTYFGVWGQGTLVTVSSASTKGPSVFPLAPSSKSTSGGTAALGCLVKDYFPEPVTVSWNSGALTSGVHTFPAVLQSSGLYSLSSVVTVPSSSLGTQTYICNVNHKPSNTKVDKKVEPKSCGGGGSGGGGSGGGGSGGGGSEVQLVESGGGLVQPGGSLRLSCAASGFTFSTYAMNWVRQAPGKGLEWVGRIRSKYNNYATYYADSVKGRFTISRDDSKNSLYLQMNSLKTEDTAVYYCVRHGNFGNSYVSWFAYWGQGTLVTVSSASVAAPSVFIFPPSDEQLKSGTASVVCLLNNFYPREAKVQWKVDNALQSGNSQESVTEQDSKDSTYSLSSTLTLSKADYEKHKVYACEVTHQGLSSPVTKSFNRGECDKTHTCPPCPAPEAAGPSVFLFPPKPKDTLMISRTPEVTCVVVDVSHEDPEVKFNWYVDGVEVHNAKTKPREEQYNSTYRVVSVLTVLHQDWLNGKEYKCKVSNKALPAPIEKTISKAKGQPREPQVYTLPPSREEMTKNQVSLSCAVKGFYPSDIAVEWESNGQPENNYKTTPPVLDSDGSFFLVSKLTVDKSRWQQGNVFSCSVMHEALHNRFTQKSLSLSPGK

SEQ ID NO: 231 - protein, 213 aa, Artificial Sequence; identical to SEQ ID NO: 42
  Synthetic

SEQ ID NO: 232 - protein, 214 aa, Artificial Sequence
  Synthetic
QAVVTQEPSLTVSPGGTVTLTCRSSTGAVTTSNYANWVQQKPGQAPRGLIGGTNKRAPWTPARFSGSLLGGKAALTITGAQAEDEADYYCALWYSNLWVFGGGTKLTVLSSASTKGPSVFPLAPSSKSTSGGTAALGCLVKDYFPEPVTVSWNSGALTSGVHTFPAVLQSSGLYSLSSVVTVPSSSLGTQTYICNVNHKPSNTKVDKKVEPKSC

SEQ ID NO: 233 - protein, 450 aa, Artificial Sequence; identical to SEQ ID NO: 229
  Synthetic

SEQ ID NO: 234 - protein, 724 aa, Artificial Sequence
  Synthetic
QVQLVQSGAEVKKPGASVKVSCKASGYTFTSYVMHWVRQKPGQGLEWIGYINPYNEGTESTDKFKGRATMTSDKSTSTVYMELSSLRSEDTAVYYCASIYYGYEGTYFGVWGQGTLVTVSSASTKGPSVFPLAPSSKSTSGGTAALGCLVKDYFPEPVTVSWNSGALTSGVHTFPAVLQSSGLYSLSSVVTVPSSSLGTQTYICNVNHKPSNTKVDKKVEPKSCGGGGSGGGGSGGGGSGGGGSQAVVTQEPSLTVSPGGTVTLTCRSSTGAVTTSNYANWVQQKPGQAPRGLIGGTNKRAPWTPARFSGSLLGGKAALTITGAQAEDEADYYCALWYSNLWVFGGGTKLTVLGGGGSGGGGSGGGGSGGGGSEVQLVESGGGLVQPGGSLRLSCAASGFTFSTYAMNWVRQAPGKGLEWVGRIRSKYNNYATYYADSVKGRFTISRDDSKNSLYLQMNSLKTEDTAVYYCVRHGNFGNSYVSWFAYWGQGTLVTVSSDKTHTCPPCPAPEAAGPSVFLFPPKPKDTLMISRTPEVTCVVVDVSHEDPEVKFNWYVDGVEVHNAKTKPREEQYNSTYRVVSVLTVLHQDWLNGKEYKCKVSNKALPAPIEKTISKAKGQPREPQVYTLPPSREEMTKNQVSLSCAVKGFYPSDIAVEWESNGQPENNYKTTPPVLDSDGSFFLVSKLTVDKSRWQQGNVFSCSVMHEALHNRFTQKSLSLSPGK

SEQ ID NO: 235 - protein, 213 aa, Artificial Sequence; identical to SEQ ID NO: 42
  Synthetic

SEQ ID NO: 236 - protein, 586 aa, Artificial Sequence
  Synthetic
QVQLVQSGAEVKKPGASVKVSCKASGYTFTSYVMHWVRQKPGQGLEWIGYINPYNEGTESTDKFKGRATMTSDKSTSTVYMELSSLRSEDTAVYYCASIYYGYEGTYFGVWGQGTLVTVSSASTKGPSVFPLAPSSKSTSGGTAALGCLVKDYFPEPVTVSWNSGALTSGVHTFPAVLQSSGLYSLSSVVTVPSSSLGTQTYICNVNHKPSNTKVDKKVEPKSCGGGGSGGGGSGGGGSGGGGSEVQLVESGGGLVQPGGSLRLSCAASGFTFSTYAMNWVRQAPGKGLEWVGRIRSKYNNYATYYADSVKGRFTISRDDSKNSLYLQMNSLKTEDTAVYYCVRHGNFGNSYVSWFAYWGQGTLVTVSSPAPEAAGPSVFLFPPKPKDTLMISRTPEVTCVVVDVSHEDPEVKFNWYVDGVEVHNAKTKPREEQYNSTYRVVSVLTVLHQDWLNGKEYKCKVSNKALPAPIEKTISKAKGQPREPQVYTLPPSREEMTKNQVSLWCLVKGFYPSDIAVEWESNGQPENNYKTTPPVLDSDGSFFLYSKLTVDKSRWQQGNVFSCSVMHEALHNHYTQKSLSLSPGK

SEQ ID NO: 237 - protein, 570 aa, Artificial Sequence
  Synthetic
QVQLVQSGAEVKKPGASVKVSCKASGYTFTSYVMHWVRQKPGQGLEWIGYINPYNEGTESTDKFKGRATMTSDKSTSTVYMELSSLRSEDTAVYYCASIYYGYEGTYFGVWGQGTLVTVSSASTKGPSVFPLAPSSKSTSGGTAALGCLVKDYFPEPVTVSWNSGALTSGVHTFPAVLQSSGLYSLSSVVTVPSSSLGTQTYICNVNHKPSNTKVDKKVEPKSCGGGGSGGGGSGGGGSGGGGSQAVVTQEPSLTVSPGGTVTLTCRSSTGAVTTSNYANWVQQKPGQAPRGLIGGTNKRAPWTPARFSGSLLGGKAALTITGAQAEDEADYYCALWYSNLWVFGGGTKLTVLPAPEAAGPSVFLFPPKPKDTLMISRTPEVTCVVVDVSHEDPEVKFNWYVDGVEVHNAKTKPREEQYNSTYRVVSVLTVLHQDWLNGKEYKCKVSNKALPAPIEKTISKAKGQPREPQVYTLPPSREEMTKNQVSLSCAVKGFYPSDIAVEWESNGQPENNYKTTPPVLDSDGSFFLVSKLTVDKSRWQQGNVFSCSVMHEALHNRFTQKSLSLSPGK

SEQ ID NO: 238 - protein, 213 aa, Artificial Sequence; identical to SEQ ID NO: 42
  Synthetic

SEQ ID NO: 239 - protein, 476 aa, Artificial Sequence
  Synthetic
QVQLVQSGAEVKKPGASVKVSCKASGYTFTSYVMHWVRQKPGQGLEWIGYINPYNEGTESTDKFKGRATMTSDKSTSTVYMELSSLRSEDTAVYYCASIYYGYEGTYFGVWGQGTLVTVSSASTKGPSVFPLAPSSKSTSGGTAALGCLVKDYFPEPVTVSWNSGALTSGVHTFPAVLQSSGLYSLSSVVTVPSSSLGTQTYICNVNHKPSNTKVDKKVEPKSCGGGGSGGGGSGGGGSGGGGSEVQLVESGGGLVQPGGSLRLSCAASGFTFSTYAMNWVRQAPGKGLEWVGRIRSKYNNYATYYADSVKGRFTISRDDSKNSLYLQMNSLKTEDTAVYYCVRHGNFGNSYVSWFAYWGQGTLVTVSSGQPREPQVYTLPPSREEMTKNQVSLWCLVKGFYPSDIAVEWESNGQPENNYKTTPPVLDSDGSFFLYSKLTVDKSRWQQGNVFSCSVMHEALHNHYTQKSLSLSPGK

SEQ ID NO: 240 - protein, 460 aa, Artificial Sequence
  Synthetic
QVQLVQSGAEVKKPGASVKVSCKASGYTFTSYVMHWVRQKPGQGLEWIGYINPYNEGTESTDKFKGRATMTSDKSTSTVYMELSSLRSEDTAVYYCASIYYGYEGTYFGVWGQGTLVTVSSASTKGPSVFPLAPSSKSTSGGTAALGCLVKDYFPEPVTVSWNSGALTSGVHTFPAVLQSSGLYSLSSVVTVPSSSLGTQTYICNVNHKPSNTKVDKKVEPKSCGGGGSGGGGSGGGGSGGGGSQAVVTQEPSLTVSPGGTVTLTCRSSTGAVTTSNYANWVQQKPGQAPRGLIGGTNKRAPWTPARFSGSLLGGKAALTITGAQAEDEADYYCALWYSNLWVFGGGTKLTVLGQPREPQVYTLPPSREEMTKNQVSLSCAVKGFYPSDIAVEWESNGQPENNYKTTPPVLDSDGSFFLVSKLTVDKSRWQQGNVFSCSVMHEALHNHYTQKSLSLSPGK

SEQ ID NO: 241 - protein, 213 aa, Artificial Sequence; identical to SEQ ID NO: 42
  Synthetic

SEQ ID NO: 242 - protein, 450 aa, Artificial Sequence; identical to SEQ ID NO: 229
  Synthetic

SEQ ID NO: 243 - protein, 714 aa, Artificial Sequence
  Synthetic
QVQLVQSGAEVKKPGASVKVSCKASGYTFTSYVMHWVRQKPGQGLEWIGYINPYNEGTESTDKFKGRATMTSDKSTSTVYMELSSLRSEDTAVYYCASIYYGYEGTYFGVWGQGTLVTVSSASTKGPSVFPLAPSSKSTSGGTAALGCLVKDYFPEPVTVSWNSGALTSGVHTFPAVLQSSGLYSLSSVVTVPSSSLGTQTYICNVNHKPSNTKVDKKVEPKSCDKTHTCPPCPAPEAAGPSVFLFPPKPKDTLMISRTPEVTCVVVDVSHEDPEVKFNWYVDGVEVHNAKTKPREEQYNSTYRVVSVLTVLHQDWLNGKEYKCKVSNKALPAPIEKTISKAKGQPREPQVYTLPPSREEMTKNQVSLSCAVKGFYPSDIAVEWESNGQPENNYKTTPPVLDSDGSFFLVSKLTVDKSRWQQGNVFSCSVMHEALHNRFTQKSLSLSPGGGGGSGGGGSGGGGSGGGGSDIQMTQSPSTLSASVGDRVTITCSASSSVSYMNWYQQKPGKAPKLLIYDTSKLASGVPSRFSGSGSGTEFTLTISSLQPDDFATYYCQQWSSNPFTFGQGTKLEIKGGGGSGGGGSGGGGSGGGGSQVQLVQSGAEVKKPGASVKVSCKASGYTFTRYTMHWVRQAPGQGLEWMGYINPSRGYTNYNQKFKDRVTMTRDTSTSTVYMELSSLRSEDTAVYYCARYYDDHYCLDYWGQGTLVTVSS

SEQ ID NO: 244 - protein, 213 aa, Artificial Sequence; identical to SEQ ID NO: 42
  Synthetic

SEQ ID NO: 245 - protein, 586 aa, Artificial Sequence
  Synthetic
QVQLVQSGAEVKKPGASVKVSCKASGYTFTSYVMHWVRQKPGQGLEWIGYINPYNEGTESTDKFKGRATMTSDKSTSTVYMELSSLRSEDTAVYYCASIYYGYEGTYFGVWGQGTLVTVSSASTKGPSVFPLAPSSKSTSGGTAALGCLVKDYFPEPVTVSWNSGALTSGVHTFPAVLQSSGLYSLSSVVTVPSSSLGTQTYICNVNHKPSNTKVDKKVEPKSCGGGGSGGGGSGGGGSGGGGSEVQLVESGGGLVQPGGSLRLSCAASGFTFSTYAMNWVRQAPGKGLEWVGRIRSKYNNYATYYADSVKGRFTISRDDSKNSLYLQMNSLKTEDTAVYYCVRHGNFGNSYVSWFAYWGQGTLVTVSSPAPELLGPSVFLFPPKPKDTLMISRTPEVTCVVVDVSHEDPEVKFNWYVDGVEVHNAKTKPREEQYNSTYRVVSVLTVLHQDWLNGKEYKCKVSNKALPAPIEKTISKAKGQPREPQVYTLPPSREEMTKNQVSLWCLVKGFYPSDIAVEWESNGQPENNYKTTPPVLDSDGSFFLYSKLTVDKSRWQQGNVFSCSVMHEALHNHYTQKSLSLSPGK

SEQ ID NO: 246 - protein, 569 aa, Artificial Sequence
  Synthetic
QVQLVQSGAEVKKPGASVKVSCKASGYTFAGFEMHWVRQAPGQGLEWMGAIDPKTGGTDYNQKFKDRVTMTRDTSISTAYMELSRLRSDDTAVYYCARDLGYFDVWGQGTLVTVSSASVAAPSVFIFPPSDEQLKSGTASVVCLLNNFYPREAKVQWKVDNALQSGNSQESVTEQDSKDSTYSLSSTLTLSKADYEKHKVYACEVTHQGLSSPVTKSFNRGECGGGGSGGGGSGGGGSGGGGSQAVVTQEPSLTVSPGGTVTLTCRSSTGAVTTSNYANWVQQKPGQAPRGLIGGTNKRAPWTPARFSGSLLGGKAALTITGAQAEDEADYYCALWYSNLWVFGGGTKLTVLPAPELLGPSVFLFPPKPKDTLMISRTPEVTCVVVDVSHEDPEVKFNWYVDGVEVHNAKTKPREEQYNSTYRVVSVLTVLHQDWLNGKEYKCKVSNKALPAPIEKTISKAKGQPREPQVYTLPPSREEMTKNQVSLSCAVKGFYPSDIAVEWESNGQPENNYKTTPPVLDSDGSFFLVSKLTVDKSRWQQGNVFSCSVMHEALHNRFTQKSLSLSPGK

SEQ ID NO: 247 - protein, 213 aa, Artificial Sequence; identical to SEQ ID NO: 42
  Synthetic

SEQ ID NO: 248 - protein, 212 aa, Artificial Sequence; identical to SEQ ID NO: 96
  Synthetic

SEQ ID NO: 249 - protein, 450 aa, Artificial Sequence; identical to SEQ ID NO: 67
  Synthetic

SEQ ID NO: 250 - protein, 697 aa, Artificial Sequence
  Synthetic
QVQLVQSGAEVKKPGASVKVSCKASGYTFAGFEMHWVRQAPGQGLEWMGAIDPKTGGTDYNQKFKDRVTMTRDTSISTAYMELSRLRSDDTAVYYCARDLGYFDVWGQGTLVTVSSASTKGPSVFPLAPSSKSTSGGTAALGCLVKDYFPEPVTVSWNSGALTSGVHTFPAVLQSSGLYSLSSVVTVPSSSLGTQTYICNVNHKPSNTKVDKKVEPKSCGGGGSGGGGSGGGGSGGGGSEVQLVESGGGLVQPGGSLRLSCAASGFTFSTYAMNWVRQAPGKGLEWVGRIRSKYNNYATYYADSVKGRFTISRDDSKNSLYLQMNSLKTEDTAVYYCVRHGNFGNSYVSWFAYWGQGTLVTVSSASVAAPSVFIFPPSDEQLKSGTASVVCLLNNFYPREAKVQWKVDNALQSGNSQESVTEQDSKDSTYSLSSTLTLSKADYEKHKVYACEVTHQGLSSPVTKSFNRGECDKTHTCPPCPAPELLGPSVFLFPPKPKDTLMISRTPEVTCVVVDVSHEDPEVKFNWYVDGVEVHNAKTKPREEQYNSTYRVVSVLTVLHQDWLNGKEYKCKVSNKALPAPIEKTISKAKGQPREPQVCTLPPSREEMTKNQVSLSCAVKGFYPSDIAVEWESNGQPENNYKTTPPVLDSDGSFFLVSKLTVDKSRWQQGNVFSCSVMHEALHNRFTQKSLSLSPGK

SEQ ID NO: 251 - protein, 213 aa, Artificial Sequence; identical to SEQ ID NO: 42
  Synthetic

SEQ ID NO: 252 - protein, 448 aa, Artificial Sequence
  Synthetic
DIQMTQSPSSLSASVGDRVTITCRASQDIRSNLNWYQQKPGGAVKLLIYYTSRLHSGVPSRFSGSGSGTDYTLTISSLQPEDFATYFCQQSEKLPRTFGGGTKVEIRRTVAAPSVFIFPPSDEQLKSGTASVVCLLNNFYPREAKVQWKVDNALQSGNSQESVTEQDSKDSTYSLSSTLTLSKADYEKHKVYACEVTHQGLSSPVTKSFNRGECGGGGSGGGGSGGGGSGGGGSQAVVTQEPSLTVSPGGTVTLTCRSSTGAVTTSNYANWVQQKPGQAPRGLIGGTNKRAPWTPARFSGSLLGGKAALTITGAQAEDEADYYCALWYSNLWVFGGGTKLTVLSSASTKGPSVFPLAPSSKSTSGGTAALGCLVKDYFPEPVTVSWNSGALTSGVHTFPAVLQSSGLYSLSSVVTVPSSSLGTQTYICNVNHKPSNTKVDKKVEPKSC

SEQ ID NO: 253 - protein, 712 aa, Artificial Sequence
  Synthetic
QVQLVQSGAEVKKPGASVKVSCKASGYTFTSYVMHWVRQKPGQGLEWIGYINPYNEGTESTDKFKGRATMTSDKSTSTVYMELSSLRSEDTAVYYCASIYYGYEGTYFGVWGQGTLVTVSSASTKGPSVFPLAPSSKSTSGGTAALGCLVKDYFPEPVTVSWNSGALTSGVHTFPAVLQSSGLYSLSSVVTVPSSSLGTQTYICNVNHKPSNTKVDKKVEPKSCDKTHTCPPCPAPEAAGPSVFLFPPKPKDTLMISRTPEVTCVVVDVSHEDPEVKFNWYVDGVEVHNAKTKPREEQYNSTYRVVSVLTVLHQDWLNGKEYKCKVSNKALPAPIEKTISKAKGQPREPQVYTLPPSREEMTKNQVSLWCLVKGFYPSDIAVEWESNGQPENNYKTTPPVLDSDGSFFLYSKLTVDKSRWQQGNVFSCSVMHEALHNHYTQKSLSLSPGGGGGSGGGGSGGGGSGGGGSQVQLVQSGAEVKKPGASVKVSCKASGYTFAGFEMHWVRQAPGQGLEWMGAIDPKTGGTDYNQKFKDRVTMTRDTSISTAYMELSRLRSDDTAVYYCARDLGYFDVWGQGTLVTVSSGGGGSGGGGSGGGGSGGGGSDIQMTQSPSSLSASVGDRVTITCRASQDIRSNLNWYQQKPGGAVKLLIYYTSRLHSGVPSRFSGSGSGTDYTLTISSLQPEDFATYFCQQSEKLPRTFGGGTKVEIR

SEQ ID NO: 254 - protein, 964 aa, Artificial Sequence
  Synthetic
QVQLVQSGAEVKKPGASVKVSCKASGYTFTSYVMHWVRQKPGQGLEWIGYINPYNEGTESTDKFKGRATMTSDKSTSTVYMELSSLRSEDTAVYYCASIYYGYEGTYFGVWGQGTLVTVSSASTKGPSVFPLAPSSKSTSGGTAALGCLVKDYFPEPVTVSWNSGALTSGVHTFPAVLQSSGLYSLSSVVTVPSSSLGTQTYICNVNHKPSNTKVDKKVEPKSCGGGGSGGGGSGGGGSGGGGSEVQLVESGGGLVQPGGSLRLSCAASGFTFSTYAMNWVRQAPGKGLEWVGRIRSKYNNYATYYADSVKGRFTISRDDSKNSLYLQMNSLKTEDTAVYYCVRHGNFGNSYVSWFAYWGQGTLVTVSSASVAAPSVFIFPPSDEQLKSGTASVVCLLNNFYPREAKVQWKVDNALQSGNSQESVTEQDSKDSTYSLSSTLTLSKADYEKHKVYACEVTHQGLSSPVTKSFNRGECDKTHTCPPCPAPEAAGPSVFLFPPKPKDTLMISRTPEVTCVVVDVSHEDPEVKFNWYVDGVEVHNAKTKPREEQYNSTYRVVSVLTVLHQDWLNGKEYKCKVSNKALPAPIEKTISKAKGQPREPQVYTLPPSREEMTKNQVSLSCAVKGFYPSDIAVEWESNGQPENNYKTTPPVLDSDGSFFLVSKLTVDKSRWQQGNVFSCSVMHEALHNRFTQKSLSLSPGGGGGSGGGGSGGGGSGGGGSQVQLVQSGAEVKKPGASVKVSCKASGYTFAGFEMHWVRQAPGQGLEWMGAIDPKTGGTDYNQKFKDRVTMTRDTSISTAYMELSRLRSDDTAVYYCARDLGYFDVWGQGTLVTVSSGGGGSGGGGSGGGGSGGGGSDIQMTQSPSSLSASVGDRVTITCRASQDIRSNLNWYQQKPGGAVKLLIYYTSRLHSGVPSRFSGSGSGTDYTLTISSLQPEDFATYFCQQSEKLPRTFGGGTKVEIR

SEQ ID NO: 255 - protein, 213 aa, Artificial Sequence; identical to SEQ ID NO: 42
  Synthetic

SEQ ID NO: 256 - protein, 214 aa, Artificial Sequence; identical to SEQ ID NO: 232
  Synthetic

SEQ ID NO: 257 - protein, 450 aa, Artificial Sequence; identical to SEQ ID NO: 229
  Synthetic

SEQ ID NO: 258 - protein, 964 aa, Artificial Sequence; identical to SEQ ID NO: 254
  Synthetic

SEQ ID NO: 259 - protein, 213 aa, Artificial Sequence; identical to SEQ ID NO: 42
  Synthetic

SEQ ID NO: 260 - protein, 214 aa, Artificial Sequence; identical to SEQ ID NO: 232
  Synthetic

SEQ ID NO: 261 - protein, 712 aa, Artificial Sequence; identical to SEQ ID NO: 253
  Synthetic

SEQ ID NO: 262 - protein, 702 aa, Artificial Sequence; identical to SEQ ID NO: 230
  Synthetic

SEQ ID NO: 263 - protein, 213 aa, Artificial Sequence; identical to SEQ ID NO: 42
  Synthetic

SEQ ID NO: 264 - protein, 214 aa, Artificial Sequence; identical to SEQ ID NO: 232
  Synthetic

SEQ ID NO: 265 - protein, 585 aa, Artificial Sequence
  Synthetic
QVQLVQSGAEVKKPGASVKVSCKASGYTFTSYVMHWVRQKPGQGLEWIGYINPYNEGTESTDKFKGRATMTSDKSTSTVYMELSSLRSEDTAVYYCASIYYGYEGTYFGVWGQGTLVTVSSASTKGPSVFPLAPSSKSTSGGTAALGCLVKDYFPEPVTVSWNSGALTSGVHTFPAVLQSSGLYSLSSVVTVPSSSLGTQTYICNVNHKPSNTKVDKKVEPKSCDKTHTCPPCPAPEAAGPSVFLFPPKPKDTLMISRTPEVTCVVVDVSHEDPEVKFNWYVDGVEVHNAKTKPREEQYNSTYRVVSVLTVLHQDWLNGKEYKCKVSNKALPAPIEKTISKAKGQPREPQVYTLPPSREEMTKNQVSLWCLVKGFYPSDIAVEWESNGQPENNYKTTPPVLDSDGSFFLYSKLTVDKSRWQQGNVFSCSVMHEALHNHYTQKSLSLSPGGGGGSGGGGSGGGGSGGGGSQVQLVQSGAEVKKPGASVKVSCKASGYTFAGFEMHWVRQAPGQGLEWMGAIDPKTGGTDYNQKFKDRVTMTRDTSISTAYMELSRLRSDDTAVYYCARDLGYFDVWGQGTLVTVSS

SEQ ID NO: 266 - protein, 828 aa, Artificial Sequence
  Synthetic
QVQLVQSGAEVKKPGASVKVSCKASGYTFTSYVMHWVRQKPGQGLEWIGYINPYNEGTESTDKFKGRATMTSDKSTSTVYMELSSLRSEDTAVYYCASIYYGYEGTYFGVWGQGTLVTVSSASTKGPSVFPLAPSSKSTSGGTAALGCLVKDYFPEPVTVSWNSGALTSGVHTFPAVLQSSGLYSLSSVVTVPSSSLGTQTYICNVNHKPSNTKVDKKVEPKSCGGGGSGGGGSGGGGSGGGGSEVQLVESGGGLVQPGGSLRLSCAASGFTFSTYAMNWVRQAPGKGLEWVGRIRSKYNNYATYYADSVKGRFTISRDDSKNSLYLQMNSLKTEDTAVYYCVRHGNFGNSYVSWFAYWGQGTLVTVSSASVAAPSVFIFPPSDEQLKSGTASVVCLLNNFYPREAKVQWKVDNALQSGNSQESVTEQDSKDSTYSLSSTLTLSKADYEKHKVYACEVTHQGLSSPVTKSFNRGECDKTHTCPPCPAPEAAGPSVFLFPPKPKDTLMISRTPEVTCVVVDVSHEDPEVKFNWYVDGVEVHNAKTKPREEQYNSTYRVVSVLTVLHQDWLNGKEYKCKVSNKALPAPIEKTISKAKGQPREPQVYTLPPSREEMTKNQVSLSCAVKGFYPSDIAVEWESNGQPENNYKTTPPVLDSDGSFFLVSKLTVDKSRWQQGNVFSCSVMHEALHNRFTQKSLSLSPGGGGGSGGGGSGGGGSGGGGSDIQMTQSPSSLSASVGDRVTITCRASQDIRSNLNWYQQKPGGAVKLLIYYTSRLHSGVPSRFSGSGSGTDYTLTISSLQPEDFATYFCQQSEKLPRTFGGGTKVEIR

SEQ ID NO: 267 - protein, 213 aa, Artificial Sequence; identical to SEQ ID NO: 42
  Synthetic

SEQ ID NO: 268 - protein, 214 aa, Artificial Sequence; identical to SEQ ID NO: 232
  Synthetic

SEQ ID NO: 269 - protein, 712 aa, Artificial Sequence; identical to SEQ ID NO: 253
  Synthetic

SEQ ID NO: 270 - protein, 724 aa, Artificial Sequence; identical to SEQ ID NO: 234
  Synthetic

SEQ ID NO: 271 - protein, 213 aa, Artificial Sequence; identical to SEQ ID NO: 42
  Synthetic

SEQ ID NO: 272 - protein, 712 aa, Artificial Sequence; identical to SEQ ID NO: 253
  Synthetic

SEQ ID NO: 273 - protein, 986 aa, Artificial Sequence
  Synthetic
QVQLVQSGAEVKKPGASVKVSCKASGYTFTSYVMHWVRQKPGQGLEWIGYINPYNEGTESTDKFKGRATMTSDKSTSTVYMELSSLRSEDTAVYYCASIYYGYEGTYFGVWGQGTLVTVSSASTKGPSVFPLAPSSKSTSGGTAALGCLVKDYFPEPVTVSWNSGALTSGVHTFPAVLQSSGLYSLSSVVTVPSSSLGTQTYICNVNHKPSNTKVDKKVEPKSCGGGGSGGGGSGGGGSGGGGSQAVVTQEPSLTVSPGGTVTLTCRSSTGAVTTSNYANWVQQKPGQAPRGLIGGTNKRAPWTPARFSGSLLGGKAALTITGAQAEDEADYYCALWYSNLWVFGGGTKLTVLGGGGSGGGGSGGGGSGGGGSEVQLVESGGGLVQPGGSLRLSCAASGFTFSTYAMNWVRQAPGKGLEWVGRIRSKYNNYATYYADSVKGRFTISRDDSKNSLYLQMNSLKTEDTAVYYCVRHGNFGNSYVSWFAYWGQGTLVTVSSDKTHTCPPCPAPEAAGPSVFLFPPKPKDTLMISRTPEVTCVVVDVSHEDPEVKFNWYVDGVEVHNAKTKPREEQYNSTYRVVSVLTVLHQDWLNGKEYKCKVSNKALPAPIEKTISKAKGQPREPQVYTLPPSREEMTKNQVSLSCAVKGFYPSDIAVEWESNGQPENNYKTTPPVLDSDGSFFLVSKLTVDKSRWQQGNVFSCSVMHEALHNRFTQKSLSLSPGGGGGSGGGGSGGGGSGGGGSQVQLVQSGAEVKKPGASVKVSCKASGYTFAGFEMHWVRQAPGQGLEWMGAIDPKTGGTDYNQKFKDRVTMTRDTSISTAYMELSRLRSDDTAVYYCARDLGYFDVWGQGTLVTVSSGGGGSGGGGSGGGGSGGGGSDIQMTQSPSSLSASVGDRVTITCRASQDIRSNLNWYQQKPGGAVKLLIYYTSRLHSGVPSRFSGSGSGTDYTLTISSLQPEDFATYFCQQSEKLPRTFGGGTKVEIR

SEQ ID NO: 274 - protein, 213 aa, Artificial Sequence; identical to SEQ ID NO: 42
  Synthetic

SEQ ID NO: 275 - protein, 450 aa, Artificial Sequence; identical to SEQ ID NO: 229
  Synthetic

SEQ ID NO: 276 - protein, 986 aa, Artificial Sequence; identical to SEQ ID NO: 273
  Synthetic

SEQ ID NO: 277 - protein, 213 aa, Artificial Sequence; identical to SEQ ID NO: 42
  Synthetic

SEQ ID NO: 278 - protein, 848 aa, Artificial Sequence
  Synthetic
QVQLVQSGAEVKKPGASVKVSCKASGYTFTSYVMHWVRQKPGQGLEWIGYINPYNEGTESTDKFKGRATMTSDKSTSTVYMELSSLRSEDTAVYYCASIYYGYEGTYFGVWGQGTLVTVSSASTKGPSVFPLAPSSKSTSGGTAALGCLVKDYFPEPVTVSWNSGALTSGVHTFPAVLQSSGLYSLSSVVTVPSSSLGTQTYICNVNHKPSNTKVDKKVEPKSCGGGGSGGGGSGGGGSGGGGSEVQLVESGGGLVQPGGSLRLSCAASGFTFSTYAMNWVRQAPGKGLEWVGRIRSKYNNYATYYADSVKGRFTISRDDSKNSLYLQMNSLKTEDTAVYYCVRHGNFGNSYVSWFAYWGQGTLVTVSSPAPEAAGPSVFLFPPKPKDTLMISRTPEVTCVVVDVSHEDPEVKFNWYVDGVEVHNAKTKPREEQYNSTYRVVSVLTVLHQDWLNGKEYKCKVSNKALPAPIEKTISKAKGQPREPQVYTLPPSREEMTKNQVSLWCLVKGFYPSDIAVEWESNGQPENNYKTTPPVLDSDGSFFLYSKLTVDKSRWQQGNVFSCSVMHEALHNHYTQKSLSLSPGGGGGSGGGGSGGGGSGGGGSQVQLVQSGAEVKKPGASVKVSCKASGYTFAGFEMHWVRQAPGQGLEWMGAIDPKTGGTDYNQKFKDRVTMTRDTSISTAYMELSRLRSDDTAVYYCARDLGYFDVWGQGTLVTVSSGGGGSGGGGSGGGGSGGGGSDIQMTQSPSSLSASVGDRVTITCRASQDIRSNLNWYQQKPGGAVKLLIYYTSRLHSGVPSRFSGSGSGTDYTLTISSLQPEDFATYFCQQSEKLPRTFGGGTKVEIR

SEQ ID NO: 279 - protein, 832 aa, Artificial Sequence
  Synthetic
QVQLVQSGAEVKKPGASVKVSCKASGYTFTSYVMHWVRQKPGQGLEWIGYINPYNEGTESTDKFKGRATMTSDKSTSTVYMELSSLRSEDTAVYYCASIYYGYEGTYFGVWGQGTLVTVSSASTKGPSVFPLAPSSKSTSGGTAALGCLVKDYFPEPVTVSWNSGALTSGVHTFPAVLQSSGLYSLSSVVTVPSSSLGTQTYICNVNHKPSNTKVDKKVEPKSCGGGGSGGGGSGGGGSGGGGSQAVVTQEPSLTVSPGGTVTLTCRSSTGAVTTSNYANWVQQKPGQAPRGLIGGTNKRAPWTPARFSGSLLGGKAALTITGAQAEDEADYYCALWYSNLWVFGGGTKLTVLPAPEAAGPSVFLFPPKPKDTLMISRTPEVTCVVVDVSHEDPEVKFNWYVDGVEVHNAKTKPREEQYNSTYRVVSVLTVLHQDWLNGKEYKCKVSNKALPAPIEKTISKAKGQPREPQVYTLPPSREEMTKNQVSLSCAVKGFYPSDIAVEWESNGQPENNYKTTPPVLDSDGSFFLVSKLTVDKSRWQQGNVFSCSVMHEALHNRFTQKSLSLSPGGGGGSGGGGSGGGGSGGGGSQVQLVQSGAEVKKPGASVKVSCKASGYTFAGFEMHWVRQAPGQGLEWMGAIDPKTGGTDYNQKFKDRVTMTRDTSISTAYMELSRLRSDDTAVYYCARDLGYFDVWGQGTLVTVSSGGGGSGGGGSGGGGSGGGGSDIQMTQSPSSLSASVGDRVTITCRASQDIRSNLNWYQQKPGGAVKLLIYYTSRLHSGVPSRFSGSGSGTDYTLTISSLQPEDFATYFCQQSEKLPRTFGGGTKVEIR

SEQ ID NO: 280 - protein, 213 aa, Artificial Sequence; identical to SEQ ID NO: 42
  Synthetic

SEQ ID NO: 281 - protein, 848 aa, Artificial Sequence; identical to SEQ ID NO: 278
  Synthetic

SEQ ID NO: 282 - protein, 570 aa, Artificial Sequence; identical to SEQ ID NO: 237
  Synthetic

SEQ ID NO: 283 - protein, 213 aa, Artificial Sequence; identical to SEQ ID NO: 42
  Synthetic

SEQ ID NO: 284 - protein, 586 aa, Artificial Sequence; identical to SEQ ID NO: 236
  Synthetic

SEQ ID NO: 285 - protein, 832 aa, Artificial Sequence; identical to SEQ ID NO: 279
  Synthetic

SEQ ID NO: 286 - protein, 213 aa, Artificial Sequence; identical to SEQ ID NO: 42
  Synthetic

SEQ ID NO: 287 - protein, 721 aa, Artificial Sequence
  Synthetic
QVQLVQSGAEVKKPGASVKVSCKASGYTFTSYVMHWVRQKPGQGLEWIGYINPYNEGTESTDKFKGRATMTSDKSTSTVYMELSSLRSEDTAVYYCASIYYGYEGTYFGVWGQGTLVTVSSASTKGPSVFPLAPSSKSTSGGTAALGCLVKDYFPEPVTVSWNSGALTSGVHTFPAVLQSSGLYSLSSVVTVPSSSLGTQTYICNVNHKPSNTKVDKKVEPKSCGGGGSGGGGSGGGGSGGGGSEVQLVESGGGLVQPGGSLRLSCAASGFTFSTYAMNWVRQAPGKGLEWVGRIRSKYNNYATYYADSVKGRFTISRDDSKNSLYLQMNSLKTEDTAVYYCVRHGNFGNSYVSWFAYWGQGTLVTVSSPAPEAAGPSVFLFPPKPKDTLMISRTPEVTCVVVDVSHEDPEVKFNWYVDGVEVHNAKTKPREEQYNSTYRVVSVLTVLHQDWLNGKEYKCKVSNKALPAPIEKTISKAKGQPREPQVYTLPPSREEMTKNQVSLWCLVKGFYPSDIAVEWESNGQPENNYKTTPPVLDSDGSFFLYSKLTVDKSRWQQGNVFSCSVMHEALHNHYTQKSLSLSPGGGGGSGGGGSGGGGSGGGGSQVQLVQSGAEVKKPGASVKVSCKASGYTFAGFEMHWVRQAPGQGLEWMGAIDPKTGGTDYNQKFKDRVTMTRDTSISTAYMELSRLRSDDTAVYYCARDLGYFDVWGQGTLVTVSS

SEQ ID NO: 288 - protein, 696 aa, Artificial Sequence
  Synthetic
QVQLVQSGAEVKKPGASVKVSCKASGYTFTSYVMHWVRQKPGQGLEWIGYINPYNEGTESTDKFKGRATMTSDKSTSTVYMELSSLRSEDTAVYYCASIYYGYEGTYFGVWGQGTLVTVSSASTKGPSVFPLAPSSKSTSGGTAALGCLVKDYFPEPVTVSWNSGALTSGVHTFPAVLQSSGLYSLSSVVTVPSSSLGTQTYICNVNHKPSNTKVDKKVEPKSCGGGGSGGGGSGGGGSGGGGSQAVVTQEPSLTVSPGGTVTLTCRSSTGAVTTSNYANWVQQKPGQAPRGLIGGTNKRAPWTPARFSGSLLGGKAALTITGAQAEDEADYYCALWYSNLWVFGGGTKLTVLPAPEAAGPSVFLFPPKPKDTLMISRTPEVTCVVVDVSHEDPEVKFNWYVDGVEVHNAKTKPREEQYNSTYRVVSVLTVLHQDWLNGKEYKCKVSNKALPAPIEKTISKAKGQPREPQVYTLPPSREEMTKNQVSLSCAVKGFYPSDIAVEWESNGQPENNYKTTPPVLDSDGSFFLVSKLTVDKSRWQQGNVFSCSVMHEALHNRFTQKSLSLSPGGGGGSGGGGSGGGGSGGGGSDIQMTQSPSSLSASVGDRVTITCRASQDIRSNLNWYQQKPGGAVKLLIYYTSRLHSGVPSRFSGSGSGTDYTLTISSLQPEDFATYFCQQSEKLPRTFGGGTKVEIR

SEQ ID NO: 289 - protein, 213 aa, Artificial Sequence; identical to SEQ ID NO: 42
  Synthetic

SEQ ID NO: 290 - protein, 586 aa, Artificial Sequence; identical to SEQ ID NO: 236
  Synthetic

SEQ ID NO: 291 - protein, 570 aa, Artificial Sequence; identical to SEQ ID NO: 237
  Synthetic

SEQ ID NO: 292 - protein, 476 aa, Artificial Sequence; identical to SEQ ID NO: 90
  Synthetic

SEQ ID NO: 293 - protein, 712 aa, Artificial Sequence; identical to SEQ ID NO: 253
  Synthetic

SEQ ID NO: 294 - protein, 714 aa, Artificial Sequence; identical to SEQ ID NO: 243
  Synthetic

SEQ ID NO: 295 - protein, 213 aa, Artificial Sequence; identical to SEQ ID NO: 42
  Synthetic

SEQ ID NO: 296 - protein, 586 aa, Artificial Sequence; identical to SEQ ID NO: 236
  Synthetic

SEQ ID NO: 297 - protein, 813 aa, Artificial Sequence
  Synthetic
QVQLVQSGAEVKKPGASVKVSCKASGYTFTSYVMHWVRQKPGQGLEWIGYINPYNEGTESTDKFKGRATMTSDKSTSTVYMELSSLRSEDTAVYYCASIYYGYEGTYFGVWGQGTLVTVSSASTKGPSVFPLAPSSKSTSGGTAALGCLVKDYFPEPVTVSWNSGALTSGVHTFPAVLQSSGLYSLSSVVTVPSSSLGTQTYICNVNHKPSNTKVDKKVEPKSCGGGGSGGGGSGGGGSGGGGSQVQLVQSGAEVKKPGASVKVSCKASGYTFAGFEMHWVRQAPGQGLEWMGAIDPKTGGTDYNQKFKDRVTMTRDTSISTAYMELSRLRSDDTAVYYCARDLGYFDVWGQGTLVTVSSASVAAPSVFIFPPSDEQLKSGTASVVCLLNNFYPREAKVQWKVDNALQSGNSQESVTEQDSKDSTYSLSSTLTLSKADYEKHKVYACEVTHQGLSSPVTKSFNRGECGGGGSGGGGSGGGGSGGGGSQAVVTQEPSLTVSPGGTVTLTCRSSTGAVTTSNYANWVQQKPGQAPRGLIGGTNKRAPWTPARFSGSLLGGKAALTITGAQAEDEADYYCALWYSNLWVFGGGTKLTVLPAPEAAGPSVFLFPPKPKDTLMISRTPEVTCVVVDVSHEDPEVKFNWYVDGVEVHNAKTKPREEQYNSTYRVVSVLTVLHQDWLNGKEYKCKVSNKALPAPIEKTISKAKGQPREPQVYTLPPSREEMTKNQVSLSCAVKGFYPSDIAVEWESNGQPENNYKTTPPVLDSDGSFFLVSKLTVDKSRWQQGNVFSCSVMHEALHNRFTQKSLSLSPGK

SEQ ID NO: 298 - protein, 213 aa, Artificial Sequence; identical to SEQ ID NO: 42
  Synthetic

SEQ ID NO: 299 - protein, 214 aa, Artificial Sequence; identical to SEQ ID NO: 232
  Synthetic

SEQ ID NO: 300 - protein, 586 aa, Artificial Sequence; identical to SEQ ID NO: 245
  Synthetic

SEQ ID NO: 301 - protein, 573 aa, Artificial Sequence
  Synthetic
QVQLVQSGAEVVKPGASVKVSCKASGYTFTSYYIHWVRQAPGQGLEWIGSIYPGNVNTNYAQKFQGRATLTVDTSISTAYMELSRLRSDDTAVYYCTRSHYGLDWNFDVWGKGTTVTVSSASVAAPSVFIFPPSDEQLKSGTASVVCLLNNFYPREAKVQWKVDNALQSGNSQESVTEQDSKDSTYSLSSTLTLSKADYEKHKVYACEVTHQGLSSPVTKSFNRGECGGGGSGGGGSGGGGSGGGGSQAVVTQEPSLTVSPGGTVTLTCRSSTGAVTTSNYANWVQQKPGQAPRGLIGGTNKRAPWTPARFSGSLLGGKAALTITGAQAEDEADYYCALWYSNLWVFGGGTKLTVLPAPELLGPSVFLFPPKPKDTLMISRTPEVTCVVVDVSHEDPEVKFNWYVDGVEVHNAKTKPREEQYNSTYRVVSVLTVLHQDWLNGKEYKCKVSNKALPAPIEKTISKAKGQPREPQVYTLPPSREEMTKNQVSLSCAVKGFYPSDIAVEWESNGQPENNYKTTPPVLDSDGSFFLVSKLTVDKSRWQQGNVFSCSVMHEALHNRFTQKSLSLSPGK

SEQ ID NO: 302 - protein, 213 aa, Artificial Sequence; identical to SEQ ID NO: 42
  Synthetic

SEQ ID NO: 303 - protein, 212 aa, Artificial Sequence
  Synthetic
DIQMTQSPSSLSASVGDRVTITCQASQNIYVWLNWYQQKPGKAPKLLIYKASNLHTGVPSRFSGSGSGTDFTLTISSLQPEDIATYYCQQGQTYPYTFGQGTKLEIKSSASTKGPSVFPLAPSSKSTSGGTAALGCLVKDYFPEPVTVSWNSGALTSGVHTFPAVLQSSGLYSLSSVVTVPSSSLGTQTYICNVNHKPSNTKVDKKVEPKSC

SEQ ID NO: 304 - protein, 716 aa, Artificial Sequence
  Synthetic
QVQLVQSGAEVKKPGASVKVSCKASGYTFTSYVMHWVRQKPGQGLEWIGYINPYNEGTESTDKFKGRATMTSDKSTSTVYMELSSLRSEDTAVYYCASIYYGYEGTYFGVWGQGTLVTVSSASTKGPSVFPLAPSSKSTSGGTAALGCLVKDYFPEPVTVSWNSGALTSGVHTFPAVLQSSGLYSLSSVVTVPSSSLGTQTYICNVNHKPSNTKVDKKVEPKSCDKTHTCPPCPAPEAAGPSVFLFPPKPKDTLMISRTPEVTCVVVDVSHEDPEVKFNWYVDGVEVHNAKTKPREEQYNSTYRVVSVLTVLHQDWLNGKEYKCKVSNKALPAPIEKTISKAKGQPREPQVYTLPPSREEMTKNQVSLWCLVKGFYPSDIAVEWESNGQPENNYKTTPPVLDSDGSFFLYSKLTVDKSRWQQGNVFSCSVMHEALHNHYTQKSLSLSPGGGGGSGGGGSGGGGSGGGGSDIQMTQSPSSLSASVGDRVTITCQASQNIYVWLNWYQQKPGKAPKLLIYKASNLHTGVPSRFSGSGSGTDFTLTISSLQPEDIATYYCQQGQTYPYTFGQGTKLEIKGGGGSGGGGSGGGGSGGGGSQVQLVQSGAEVVKPGASVKVSCKASGYTFTSYYIHWVRQAPGQGLEWIGSIYPGNVNTNYAQKFQGRATLTVDTSISTAYMELSRLRSDDTAVYYCTRSHYGLDWNFDVWGKGTTVTVSS

SEQ ID NO: 305 - protein, 968 aa, Artificial Sequence
  Synthetic
QVQLVQSGAEVKKPGASVKVSCKASGYTFTSYVMHWVRQKPGQGLEWIGYINPYNEGTESTDKFKGRATMTSDKSTSTVYMELSSLRSEDTAVYYCASIYYGYEGTYFGVWGQGTLVTVSSASTKGPSVFPLAPSSKSTSGGTAALGCLVKDYFPEPVTVSWNSGALTSGVHTFPAVLQSSGLYSLSSVVTVPSSSLGTQTYICNVNHKPSNTKVDKKVEPKSCGGGGSGGGGSGGGGSGGGGSEVQLVESGGGLVQPGGSLRLSCAASGFTFSTYAMNWVRQAPGKGLEWVGRIRSKYNNYATYYADSVKGRFTISRDDSKNSLYLQMNSLKTEDTAVYYCVRHGNFGNSYVSWFAYWGQGTLVTVSSASVAAPSVFIFPPSDEQLKSGTASVVCLLNNFYPREAKVQWKVDNALQSGNSQESVTEQDSKDSTYSLSSTLTLSKADYEKHKVYACEVTHQGLSSPVTKSFNRGECDKTHTCPPCPAPEAAGPSVFLFPPKPKDTLMISRTPEVTCVVVDVSHEDPEVKFNWYVDGVEVHNAKTKPREEQYNSTYRVVSVLTVLHQDWLNGKEYKCKVSNKALPAPIEKTISKAKGQPREPQVYTLPPSREEMTKNQVSLSCAVKGFYPSDIAVEWESNGQPENNYKTTPPVLDSDGSFFLVSKLTVDKSRWQQGNVFSCSVMHEALHNRFTQKSLSLSPGGGGGSGGGGSGGGGSGGGGSDIQMTQSPSSLSASVGDRVTITCQASQNIYVWLNWYQQKPGKAPKLLIYKASNLHTGVPSRFSGSGSGTDFTLTISSLQPEDIATYYCQQGQTYPYTFGQGTKLEIKGGGGSGGGGSGGGGSGGGGSQVQLVQSGAEVVKPGASVKVSCKASGYTFTSYYIHWVRQAPGQGLEWIGSIYPGNVNTNYAQKFQGRATLTVDTSISTAYMELSRLRSDDTAVYYCTRSHYGLDWNFDVWGKGTTVTVSS

SEQ ID NO: 306 - protein, 213 aa, Artificial Sequence; identical to SEQ ID NO: 42
  Synthetic

SEQ ID NO: 307 - protein, 214 aa, Artificial Sequence; identical to SEQ ID NO: 232
  Synthetic

SEQ ID NO: 308 - protein, 716 aa, Artificial Sequence
  Synthetic
QVQLVQSGAEVKKPGASVKVSCKASGYTFTSYVMHWVRQKPGQGLEWIGYINPYNEGTESTDKFKGRATMTSDKSTSTVYMELSSLRSEDTAVYYCASIYYGYEGTYFGVWGQGTLVTVSSASTKGPSVFPLAPSSKSTSGGTAALGCLVKDYFPEPVTVSWNSGALTSGVHTFPAVLQSSGLYSLSSVVTVPSSSLGTQTYICNVNHKPSNTKVDKKVEPKSCDKTHTCPPCPAPEAAGPSVFLFPPKPKDTLMISRTPEVTCVVVDVSHEDPEVKFNWYVDGVEVHNAKTKPREEQYNSTYRVVSVLTVLHQDWLNGKEYKCKVSNKALPAPIEKTISKAKGQPREPQVYTLPPSREEMTKNQVSLWCLVKGFYPSDIAVEWESNGQPENNYKTTPPVLDSDGSFFLYSKLTVDKSRWQQGNVFSCSVMHEALHNHYTQKSLSLSPGGGGGSGGGGSGGGGSGGGGSQVQLVQSGAEVVKPGASVKVSCKASGYTFTSYYIHWVRQAPGQGLEWIGSIYPGNVNTNYAQKFQGRATLTVDTSISTAYMELSRLRSDDTAVYYCTRSHYGLDWNFDVWGKGTTVTVSSGGGGSGGGGSGGGGSGGGGSDIQMTQSPSSLSASVGDRVTITCQASQNIYVWLNWYQQKPGKAPKLLIYKASNLHTGVPSRFSGSGSGTDFTLTISSLQPEDIATYYCQQGQTYPYTFGQGTKLEIK

SEQ ID NO: 309 - protein, 968 aa, Artificial Sequence
  Synthetic
QVQLVQSGAEVKKPGASVKVSCKASGYTFTSYVMHWVRQKPGQGLEWIGYINPYNEGTESTDKFKGRATMTSDKSTSTVYMELSSLRSEDTAVYYCASIYYGYEGTYFGVWGQGTLVTVSSASTKGPSVFPLAPSSKSTSGGTAALGCLVKDYFPEPVTVSWNSGALTSGVHTFPAVLQSSGLYSLSSVVTVPSSSLGTQTYICNVNHKPSNTKVDKKVEPKSCGGGGSGGGGSGGGGSGGGGSEVQLVESGGGLVQPGGSLRLSCAASGFTFSTYAMNWVRQAPGKGLEWVGRIRSKYNNYATYYADSVKGRFTISRDDSKNSLYLQMNSLKTEDTAVYYCVRHGNFGNSYVSWFAYWGQGTLVTVSSASVAAPSVFIFPPSDEQLKSGTASVVCLLNNFYPREAKVQWKVDNALQSGNSQESVTEQDSKDSTYSLSSTLTLSKADYEKHKVYACEVTHQGLSSPVTKSFNRGECDKTHTCPPCPAPEAAGPSVFLFPPKPKDTLMISRTPEVTCVVVDVSHEDPEVKFNWYVDGVEVHNAKTKPREEQYNSTYRVVSVLTVLHQDWLNGKEYKCKVSNKALPAPIEKTISKAKGQPREPQVYTLPPSREEMTKNQVSLSCAVKGFYPSDIAVEWESNGQPENNYKTTPPVLDSDGSFFLVSKLTVDKSRWQQGNVFSCSVMHEALHNRFTQKSLSLSPGGGGGSGGGGSGGGGSGGGGSQVQLVQSGAEVVKPGASVKVSCKASGYTFTSYYIHWVRQAPGQGLEWIGSIYPGNVNTNYAQKFQGRATLTVDTSISTAYMELSRLRSDDTAVYYCTRSHYGLDWNFDVWGKGTTVTVSSGGGGSGGGGSGGGGSGGGGSDIQMTQSPSSLSASVGDRVTITCQASQNIYVWLNWYQQKPGKAPKLLIYKASNLHTGVPSRFSGSGSGTDFTLTISSLQPEDIATYYCQQGQTYPYTFGQGTKLEIK

SEQ ID NO: 310 - protein, 213 aa, Artificial Sequence; identical to SEQ ID NO: 42
  Synthetic

SEQ ID NO: 311 - protein, 214 aa, Artificial Sequence; identical to SEQ ID NO: 232
  Synthetic

SEQ ID NO: 312 - protein, 450 aa, Artificial Sequence; identical to SEQ ID NO: 229
  Synthetic

SEQ ID NO: 313 - protein, 968 aa, Artificial Sequence; identical to SEQ ID NO: 305
  Synthetic

SEQ ID NO: 314 - protein, 213 aa, Artificial Sequence; identical to SEQ ID NO: 42
  Synthetic

SEQ ID NO: 315 - protein, 214 aa, Artificial Sequence; identical to SEQ ID NO: 232
  Synthetic

SEQ ID NO: 316 - protein, 450 aa, Artificial Sequence; identical to SEQ ID NO: 229
  Synthetic

SEQ ID NO: 317 - protein, 968 aa, Artificial Sequence; identical to SEQ ID NO: 309
  Synthetic

SEQ ID NO: 318 - protein, 213 aa, Artificial Sequence; identical to SEQ ID NO: 42
  Synthetic

SEQ ID NO: 319 - protein, 214 aa, Artificial Sequence; identical to SEQ ID NO: 232
  Synthetic

SEQ ID NO: 320 - protein, 716 aa, Artificial Sequence; identical to SEQ ID NO: 304
  Synthetic

SEQ ID NO: 321 - protein, 702 aa, Artificial Sequence; identical to SEQ ID NO: 230
  Synthetic

SEQ ID NO: 322 - protein, 213 aa, Artificial Sequence; identical to SEQ ID NO: 42
  Synthetic

SEQ ID NO: 323 - protein, 214 aa, Artificial Sequence; identical to SEQ ID NO: 232
  Synthetic

SEQ ID NO: 324 - protein, 716 aa, Artificial Sequence; identical to SEQ ID NO: 308
  Synthetic

SEQ ID NO: 325 - protein, 702 aa, Artificial Sequence; identical to SEQ ID NO: 230
  Synthetic

SEQ ID NO: 326 - protein, 213 aa, Artificial Sequence; identical to SEQ ID NO: 42
  Synthetic

SEQ ID NO: 327 - protein, 214 aa, Artificial Sequence; identical to SEQ ID NO: 232
  Synthetic

SEQ ID NO: 328 - protein, 589 aa, Artificial Sequence
  Synthetic
QVQLVQSGAEVKKPGASVKVSCKASGYTFTSYVMHWVRQKPGQGLEWIGYINPYNEGTESTDKFKGRATMTSDKSTSTVYMELSSLRSEDTAVYYCASIYYGYEGTYFGVWGQGTLVTVSSASTKGPSVFPLAPSSKSTSGGTAALGCLVKDYFPEPVTVSWNSGALTSGVHTFPAVLQSSGLYSLSSVVTVPSSSLGTQTYICNVNHKPSNTKVDKKVEPKSCDKTHTCPPCPAPEAAGPSVFLFPPKPKDTLMISRTPEVTCVVVDVSHEDPEVKFNWYVDGVEVHNAKTKPREEQYNSTYRVVSVLTVLHQDWLNGKEYKCKVSNKALPAPIEKTISKAKGQPREPQVYTLPPSREEMTKNQVSLWCLVKGFYPSDIAVEWESNGQPENNYKTTPPVLDSDGSFFLYSKLTVDKSRWQQGNVFSCSVMHEALHNHYTQKSLSLSPGGGGGSGGGGSGGGGSGGGGSQVQLVQSGAEVVKPGASVKVSCKASGYTFTSYYIHWVRQAPGQGLEWIGSIYPGNVNTNYAQKFQGRATLTVDTSISTAYMELSRLRSDDTAVYYCTRSHYGLDWNFDVWGKGTTVTVSS

SEQ ID NO: 329 - protein, 828 aa, Artificial Sequence
  Synthetic
QVQLVQSGAEVKKPGASVKVSCKASGYTFTSYVMHWVRQKPGQGLEWIGYINPYNEGTESTDKFKGRATMTSDKSTSTVYMELSSLRSEDTAVYYCASIYYGYEGTYFGVWGQGTLVTVSSASTKGPSVFPLAPSSKSTSGGTAALGCLVKDYFPEPVTVSWNSGALTSGVHTFPAVLQSSGLYSLSSVVTVPSSSLGTQTYICNVNHKPSNTKVDKKVEPKSCGGGGSGGGGSGGGGSGGGGSEVQLVESGGGLVQPGGSLRLSCAASGFTFSTYAMNWVRQAPGKGLEWVGRIRSKYNNYATYYADSVKGRFTISRDDSKNSLYLQMNSLKTEDTAVYYCVRHGNFGNSYVSWFAYWGQGTLVTVSSASVAAPSVFIFPPSDEQLKSGTASVVCLLNNFYPREAKVQWKVDNALQSGNSQESVTEQDSKDSTYSLSSTLTLSKADYEKHKVYACEVTHQGLSSPVTKSFNRGECDKTHTCPPCPAPEAAGPSVFLFPPKPKDTLMISRTPEVTCVVVDVSHEDPEVKFNWYVDGVEVHNAKTKPREEQYNSTYRVVSVLTVLHQDWLNGKEYKCKVSNKALPAPIEKTISKAKGQPREPQVYTLPPSREEMTKNQVSLSCAVKGFYPSDIAVEWESNGQPENNYKTTPPVLDSDGSFFLVSKLTVDKSRWQQGNVFSCSVMHEALHNRFTQKSLSLSPGGGGGSGGGGSGGGGSGGGGSDIQMTQSPSSLSASVGDRVTITCQASQNIYVWLNWYQQKPGKAPKLLIYKASNLHTGVPSRFSGSGSGTDFTLTISSLQPEDIATYYCQQGQTYPYTFGQGTKLEIK

SEQ ID NO: 330 - protein, 213 aa, Artificial Sequence; identical to SEQ ID NO: 42
  Synthetic

SEQ ID NO: 331 - protein, 214 aa, Artificial Sequence; identical to SEQ ID NO: 232
  Synthetic

SEQ ID NO: 332 - protein, 716 aa, Artificial Sequence; identical to SEQ ID NO: 304
  Synthetic

SEQ ID NO: 333 - protein, 724 aa, Artificial Sequence; identical to SEQ ID NO: 234
  Synthetic

SEQ ID NO: 334 - protein, 213 aa, Artificial Sequence; identical to SEQ ID NO: 42
  Synthetic

SEQ ID NO: 335 - protein, 716 aa, Artificial Sequence; identical to SEQ ID NO: 308
  Synthetic

SEQ ID NO: 336 - protein, 724 aa, Artificial Sequence; identical to SEQ ID NO: 234
  Synthetic

SEQ ID NO: 337 - protein, 213 aa, Artificial Sequence; identical to SEQ ID NO: 42
  Synthetic

SEQ ID NO: 338 - protein, 716 aa, Artificial Sequence; identical to SEQ ID NO: 304
  Synthetic

SEQ ID NO: 339 - protein, 990 aa, Artificial Sequence
  Synthetic
QVQLVQSGAEVKKPGASVKVSCKASGYTFTSYVMHWVRQKPGQGLEWIGYINPYNEGTESTDKFKGRATMTSDKSTSTVYMELSSLRSEDTAVYYCASIYYGYEGTYFGVWGQGTLVTVSSASTKGPSVFPLAPSSKSTSGGTAALGCLVKDYFPEPVTVSWNSGALTSGVHTFPAVLQSSGLYSLSSVVTVPSSSLGTQTYICNVNHKPSNTKVDKKVEPKSCGGGGSGGGGSGGGGSGGGGSQAVVTQEPSLTVSPGGTVTLTCRSSTGAVTTSNYANWVQQKPGQAPRGLIGGTNKRAPWTPARFSGSLLGGKAALTITGAQAEDEADYYCALWYSNLWVFGGGTKLTVLGGGGSGGGGSGGGGSGGGGSEVQLVESGGGLVQPGGSLRLSCAASGFTFSTYAMNWVRQAPGKGLEWVGRIRSKYNNYATYYADSVKGRFTISRDDSKNSLYLQMNSLKTEDTAVYYCVRHGNFGNSYVSWFAYWGQGTLVTVSSDKTHTCPPCPAPEAAGPSVFLFPPKPKDTLMISRTPEVTCVVVDVSHEDPEVKFNWYVDGVEVHNAKTKPREEQYNSTYRVVSVLTVLHQDWLNGKEYKCKVSNKALPAPIEKTISKAKGQPREPQVYTLPPSREEMTKNQVSLSCAVKGFYPSDIAVEWESNGQPENNYKTTPPVLDSDGSFFLVSKLTVDKSRWQQGNVFSCSVMHEALHNRFTQKSLSLSPGGGGGSGGGGSGGGGSGGGGSDIQMTQSPSSLSASVGDRVTITCQASQNIYVWLNWYQQKPGKAPKLLIYKASNLHTGVPSRFSGSGSGTDFTLTISSLQPEDIATYYCQQGQTYPYTFGQGTKLEIKGGGGSGGGGSGGGGSGGGGSQVQLVQSGAEVVKPGASVKVSCKASGYTFTSYYIHWVRQAPGQGLEWIGSIYPGNVNTNYAQKFQGRATLTVDTSISTAYMELSRLRSDDTAVYYCTRSHYGLDWNFDVWGKGTTVTVSS

SEQ ID NO: 340 - protein, 213 aa, Artificial Sequence; identical to SEQ ID NO: 42
  Synthetic

SEQ ID NO: 341 - protein, 716 aa, Artificial Sequence; identical to SEQ ID NO: 308
  Synthetic

SEQ ID NO: 342 - protein, 990 aa, Artificial Sequence
  Synthetic
QVQLVQSGAEVKKPGASVKVSCKASGYTFTSYVMHWVRQKPGQGLEWIGYINPYNEGTESTDKFKGRATMTSDKSTSTVYMELSSLRSEDTAVYYCASIYYGYEGTYFGVWGQGTLVTVSSASTKGPSVFPLAPSSKSTSGGTAALGCLVKDYFPEPVTVSWNSGALTSGVHTFPAVLQSSGLYSLSSVVTVPSSSLGTQTYICNVNHKPSNTKVDKKVEPKSCGGGGSGGGGSGGGGSGGGGSQAVVTQEPSLTVSPGGTVTLTCRSSTGAVTTSNYANWVQQKPGQAPRGLIGGTNKRAPWTPARFSGSLLGGKAALTITGAQAEDEADYYCALWYSNLWVFGGGTKLTVLGGGGSGGGGSGGGGSGGGGSEVQLVESGGGLVQPGGSLRLSCAASGFTFSTYAMNWVRQAPGKGLEWVGRIRSKYNNYATYYADSVKGRFTISRDDSKNSLYLQMNSLKTEDTAVYYCVRHGNFGNSYVSWFAYWGQGTLVTVSSDKTHTCPPCPAPEAAGPSVFLFPPKPKDTLMISRTPEVTCVVVDVSHEDPEVKFNWYVDGVEVHNAKTKPREEQYNSTYRVVSVLTVLHQDWLNGKEYKCKVSNKALPAPIEKTISKAKGQPREPQVYTLPPSREEMTKNQVSLSCAVKGFYPSDIAVEWESNGQPENNYKTTPPVLDSDGSFFLVSKLTVDKSRWQQGNVFSCSVMHEALHNRFTQKSLSLSPGGGGGSGGGGSGGGGSGGGGSQVQLVQSGAEVVKPGASVKVSCKASGYTFTSYYIHWVRQAPGQGLEWIGSIYPGNVNTNYAQKFQGRATLTVDTSISTAYMELSRLRSDDTAVYYCTRSHYGLDWNFDVWGKGTTVTVSSGGGGSGGGGSGGGGSGGGGSDIQMTQSPSSLSASVGDRVTITCQASQNIYVWLNWYQQKPGKAPKLLIYKASNLHTGVPSRFSGSGSGTDFTLTISSLQPEDIATYYCQQGQTYPYTFGQGTKLEIK

SEQ ID NO: 343 - protein, 213 aa, Artificial Sequence; identical to SEQ ID NO: 42
  Synthetic

SEQ ID NO: 344 - protein, 450 aa, Artificial Sequence; identical to SEQ ID NO: 229
  Synthetic

SEQ ID NO: 345 - protein, 990 aa, Artificial Sequence; identical to SEQ ID NO: 339
  Synthetic

SEQ ID NO: 346 - protein, 213 aa, Artificial Sequence; identical to SEQ ID NO: 42
  Synthetic

SEQ ID NO: 347 - protein, 450 aa, Artificial Sequence; identical to SEQ ID NO: 229
  Synthetic

SEQ ID NO: 348 - protein, 990 aa, Artificial Sequence; identical to SEQ ID NO: 342
  Synthetic

SEQ ID NO: 349 - protein, 213 aa, Artificial Sequence; identical to SEQ ID NO: 42
  Synthetic

SEQ ID NO: 350 - protein, 852 aa, Artificial Sequence
  Synthetic
QVQLVQSGAEVKKPGASVKVSCKASGYTFTSYVMHWVRQKPGQGLEWIGYINPYNEGTESTDKFKGRATMTSDKSTSTVYMELSSLRSEDTAVYYCASIYYGYEGTYFGVWGQGTLVTVSSASTKGPSVFPLAPSSKSTSGGTAALGCLVKDYFPEPVTVSWNSGALTSGVHTFPAVLQSSGLYSLSSVVTVPSSSLGTQTYICNVNHKPSNTKVDKKVEPKSCGGGGSGGGGSGGGGSGGGGSEVQLVESGGGLVQPGGSLRLSCAASGFTFSTYAMNWVRQAPGKGLEWVGRIRSKYNNYATYYADSVKGRFTISRDDSKNSLYLQMNSLKTEDTAVYYCVRHGNFGNSYVSWFAYWGQGTLVTVSSPAPEAAGPSVFLFPPKPKDTLMISRTPEVTCVVVDVSHEDPEVKFNWYVDGVEVHNAKTKPREEQYNSTYRVVSVLTVLHQDWLNGKEYKCKVSNKALPAPIEKTISKAKGQPREPQVYTLPPSREEMTKNQVSLWCLVKGFYPSDIAVEWESNGQPENNYKTTPPVLDSDGSFFLYSKLTVDKSRWQQGNVFSCSVMHEALHNHYTQKSLSLSPGGGGGSGGGGSGGGGSGGGGSDIQMTQSPSSLSASVGDRVTITCQASQNIYVWLNWYQQKPGKAPKLLIYKASNLHTGVPSRFSGSGSGTDFTLTISSLQPEDIATYYCQQGQTYPYTFGQGTKLEIKGGGGSGGGGSGGGGSGGGGSQVQLVQSGAEVVKPGASVKVSCKASGYTFTSYYIHWVRQAPGQGLEWIGSIYPGNVNTNYAQKFQGRATLTVDTSISTAYMELSRLRSDDTAVYYCTRSHYGLDWNFDVWGKGTTVTVSS

SEQ ID NO: 351 - protein, 836 aa, Artificial Sequence
  Synthetic
QVQLVQSGAEVKKPGASVKVSCKASGYTFTSYVMHWVRQKPGQGLEWIGYINPYNEGTESTDKFKGRATMTSDKSTSTVYMELSSLRSEDTAVYYCASIYYGYEGTYFGVWGQGTLVTVSSASTKGPSVFPLAPSSKSTSGGTAALGCLVKDYFPEPVTVSWNSGALTSGVHTFPAVLQSSGLYSLSSVVTVPSSSLGTQTYICNVNHKPSNTKVDKKVEPKSCGGGGSGGGGSGGGGSGGGGSQAVVTQEPSLTVSPGGTVTLTCRSSTGAVTTSNYANWVQQKPGQAPRGLIGGTNKRAPWTPARFSGSLLGGKAALTITGAQAEDEADYYCALWYSNLWVFGGGTKLTVLPAPEAAGPSVFLFPPKPKDTLMISRTPEVTCVVVDVSHEDPEVKFNWYVDGVEVHNAKTKPREEQYNSTYRVVSVLTVLHQDWLNGKEYKCKVSNKALPAPIEKTISKAKGQPREPQVYTLPPSREEMTKNQVSLSCAVKGFYPSDIAVEWESNGQPENNYKTTPPVLDSDGSFFLVSKLTVDKSRWQQGNVFSCSVMHEALHNRFTQKSLSLSPGGGGGSGGGGSGGGGSGGGGSDIQMTQSPSSLSASVGDRVTITCQASQNIYVWLNWYQQKPGKAPKLLIYKASNLHTGVPSRFSGSGSGTDFTLTISSLQPEDIATYYCQQGQTYPYTFGQGTKLEIKGGGGSGGGGSGGGGSGGGGSQVQLVQSGAEVVKPGASVKVSCKASGYTFTSYYIHWVRQAPGQGLEWIGSIYPGNVNTNYAQKFQGRATLTVDTSISTAYMELSRLRSDDTAVYYCTRSHYGLDWNFDVWGKGTTVTVSS

SEQ ID NO: 352 - protein, 213 aa, Artificial Sequence; identical to SEQ ID NO: 42
  Synthetic

SEQ ID NO: 353 - protein, 852 aa, Artificial Sequence
  Synthetic
QVQLVQSGAEVKKPGASVKVSCKASGYTFTSYVMHWVRQKPGQGLEWIGYINPYNEGTESTDKFKGRATMTSDKSTSTVYMELSSLRSEDTAVYYCASIYYGYEGTYFGVWGQGTLVTVSSASTKGPSVFPLAPSSKSTSGGTAALGCLVKDYFPEPVTVSWNSGALTSGVHTFPAVLQSSGLYSLSSVVTVPSSSLGTQTYICNVNHKPSNTKVDKKVEPKSCGGGGSGGGGSGGGGSGGGGSEVQLVESGGGLVQPGGSLRLSCAASGFTFSTYAMNWVRQAPGKGLEWVGRIRSKYNNYATYYADSVKGRFTISRDDSKNSLYLQMNSLKTEDTAVYYCVRHGNFGNSYVSWFAYWGQGTLVTVSSPAPEAAGPSVFLFPPKPKDTLMISRTPEVTCVVVDVSHEDPEVKFNWYVDGVEVHNAKTKPREEQYNSTYRVVSVLTVLHQDWLNGKEYKCKVSNKALPAPIEKTISKAKGQPREPQVYTLPPSREEMTKNQVSLWCLVKGFYPSDIAVEWESNGQPENNYKTTPPVLDSDGSFFLYSKLTVDKSRWQQGNVFSCSVMHEALHNHYTQKSLSLSPGGGGGSGGGGSGGGGSGGGGSQVQLVQSGAEVVKPGASVKVSCKASGYTFTSYYIHWVRQAPGQGLEWIGSIYPGNVNTNYAQKFQGRATLTVDTSISTAYMELSRLRSDDTAVYYCTRSHYGLDWNFDVWGKGTTVTVSSGGGGSGGGGSGGGGSGGGGSDIQMTQSPSSLSASVGDRVTITCQASQNIYVWLNWYQQKPGKAPKLLIYKASNLHTGVPSRFSGSGSGTDFTLTISSLQPEDIATYYCQQGQTYPYTFGQGTKLEIK

SEQ ID NO: 354 - protein, 836 aa, Artificial Sequence
  Synthetic
QVQLVQSGAEVKKPGASVKVSCKASGYTFTSYVMHWVRQKPGQGLEWIGYINPYNEGTESTDKFKGRATMTSDKSTSTVYMELSSLRSEDTAVYYCASIYYGYEGTYFGVWGQGTLVTVSSASTKGPSVFPLAPSSKSTSGGTAALGCLVKDYFPEPVTVSWNSGALTSGVHTFPAVLQSSGLYSLSSVVTVPSSSLGTQTYICNVNHKPSNTKVDKKVEPKSCGGGGSGGGGSGGGGSGGGGSQAVVTQEPSLTVSPGGTVTLTCRSSTGAVTTSNYANWVQQKPGQAPRGLIGGTNKRAPWTPARFSGSLLGGKAALTITGAQAEDEADYYCALWYSNLWVFGGGTKLTVLPAPEAAGPSVFLFPPKPKDTLMISRTPEVTCVVVDVSHEDPEVKFNWYVDGVEVHNAKTKPREEQYNSTYRVVSVLTVLHQDWLNGKEYKCKVSNKALPAPIEKTISKAKGQPREPQVYTLPPSREEMTKNQVSLSCAVKGFYPSDIAVEWESNGQPENNYKTTPPVLDSDGSFFLVSKLTVDKSRWQQGNVFSCSVMHEALHNRFTQKSLSLSPGGGGGSGGGGSGGGGSGGGGSQVQLVQSGAEVVKPGASVKVSCKASGYTFTSYYIHWVRQAPGQGLEWIGSIYPGNVNTNYAQKFQGRATLTVDTSISTAYMELSRLRSDDTAVYYCTRSHYGLDWNFDVWGKGTTVTVSSGGGGSGGGGSGGGGSGGGGSDIQMTQSPSSLSASVGDRVTITCQASQNIYVWLNWYQQKPGKAPKLLIYKASNLHTGVPSRFSGSGSGTDFTLTISSLQPEDIATYYCQQGQTYPYTFGQGTKLEIK

SEQ ID NO: 355 - protein, 213 aa, Artificial Sequence; identical to SEQ ID NO: 42
  Synthetic

SEQ ID NO: 356 - protein, 852 aa, Artificial Sequence; identical to SEQ ID NO: 350
  Synthetic

SEQ ID NO: 357 - protein, 570 aa, Artificial Sequence; identical to SEQ ID NO: 237
  Synthetic

SEQ ID NO: 358 - protein, 213 aa, Artificial Sequence; identical to SEQ ID NO: 42
  Synthetic

SEQ ID NO: 359 - protein, 852 aa, Artificial Sequence; identical to SEQ ID NO: 353
  Synthetic

SEQ ID NO: 360 - protein, 570 aa, Artificial Sequence; identical to SEQ ID NO: 237
  Synthetic

SEQ ID NO: 361 - protein, 213 aa, Artificial Sequence; identical to SEQ ID NO: 42
  Synthetic

SEQ ID NO: 362 - protein, 586 aa, Artificial Sequence; identical to SEQ ID NO: 236
  Synthetic

SEQ ID NO: 363 - protein, 836 aa, Artificial Sequence; identical to SEQ ID NO: 351
  Synthetic

SEQ ID NO: 364 - protein, 213 aa, Artificial Sequence; identical to SEQ ID NO: 42
  Synthetic

SEQ ID NO: 365 - protein, 586 aa, Artificial Sequence; identical to SEQ ID NO: 236
  Synthetic

SEQ ID NO: 366 - protein, 836 aa, Artificial Sequence; identical to SEQ ID NO: 354
  Synthetic

SEQ ID NO: 367 - protein, 213 aa, Artificial Sequence; identical to SEQ ID NO: 42
  Synthetic

SEQ ID NO: 368 - protein, 725 aa, Artificial Sequence
  Synthetic
QVQLVQSGAEVKKPGASVKVSCKASGYTFTSYVMHWVRQKPGQGLEWIGYINPYNEGTESTDKFKGRATMTSDKSTSTVYMELSSLRSEDTAVYYCASIYYGYEGTYFGVWGQGTLVTVSSASTKGPSVFPLAPSSKSTSGGTAALGCLVKDYFPEPVTVSWNSGALTSGVHTFPAVLQSSGLYSLSSVVTVPSSSLGTQTYICNVNHKPSNTKVDKKVEPKSCGGGGSGGGGSGGGGSGGGGSEVQLVESGGGLVQPGGSLRLSCAASGFTFSTYAMNWVRQAPGKGLEWVGRIRSKYNNYATYYADSVKGRFTISRDDSKNSLYLQMNSLKTEDTAVYYCVRHGNFGNSYVSWFAYWGQGTLVTVSSPAPEAAGPSVFLFPPKPKDTLMISRTPEVTCVVVDVSHEDPEVKFNWYVDGVEVHNAKTKPREEQYNSTYRVVSVLTVLHQDWLNGKEYKCKVSNKALPAPIEKTISKAKGQPREPQVYTLPPSREEMTKNQVSLWCLVKGFYPSDIAVEWESNGQPENNYKTTPPVLDSDGSFFLYSKLTVDKSRWQQGNVFSCSVMHEALHNHYTQKSLSLSPGGGGGSGGGGSGGGGSGGGGSQVQLVQSGAEVVKPGASVKVSCKASGYTFTSYYIHWVRQAPGQGLEWIGSIYPGNVNTNYAQKFQGRATLTVDTSISTAYMELSRLRSDDTAVYYCTRSHYGLDWNFDVWGKGTTVTVSS

SEQ ID NO: 369 - protein, 696 aa, Artificial Sequence
  Synthetic
QVQLVQSGAEVKKPGASVKVSCKASGYTFTSYVMHWVRQKPGQGLEWIGYINPYNEGTESTDKFKGRATMTSDKSTSTVYMELSSLRSEDTAVYYCASIYYGYEGTYFGVWGQGTLVTVSSASTKGPSVFPLAPSSKSTSGGTAALGCLVKDYFPEPVTVSWNSGALTSGVHTFPAVLQSSGLYSLSSVVTVPSSSLGTQTYICNVNHKPSNTKVDKKVEPKSCGGGGSGGGGSGGGGSGGGGSQAVVTQEPSLTVSPGGTVTLTCRSSTGAVTTSNYANWVQQKPGQAPRGLIGGTNKRAPWTPARFSGSLLGGKAALTITGAQAEDEADYYCALWYSNLWVFGGGTKLTVLPAPEAAGPSVFLFPPKPKDTLMISRTPEVTCVVVDVSHEDPEVKFNWYVDGVEVHNAKTKPREEQYNSTYRVVSVLTVLHQDWLNGKEYKCKVSNKALPAPIEKTISKAKGQPREPQVYTLPPSREEMTKNQVSLSCAVKGFYPSDIAVEWESNGQPENNYKTTPPVLDSDGSFFLVSKLTVDKSRWQQGNVFSCSVMHEALHNRFTQKSLSLSPGGGGGSGGGGSGGGGSGGGGSDIQMTQSPSSLSASVGDRVTITCQASQNIYVWLNWYQQKPGKAPKLLIYKASNLHTGVPSRFSGSGSGTDFTLTISSLQPEDIATYYCQQGQTYPYTFGQGTKLEIK

SEQ ID NO: 370 - protein, 213 aa, Artificial Sequence; identical to SEQ ID NO: 42
  Synthetic

SEQ ID NO: 371 - protein, 586 aa, Artificial Sequence; identical to SEQ ID NO: 236
  Synthetic

SEQ ID NO: 372 - protein, 570 aa, Artificial Sequence; identical to SEQ ID NO: 237
  Synthetic

SEQ ID NO: 373 - protein, 480 aa, Artificial Sequence
  Synthetic
EIVLTQSPATLSLSPGERATLSCRASSSVSYMHWYQQKPGQAPRPWIYATSNLASGIPARFSGSRSGTDYTLTISSLEPEDFAVYYCQQWSSNTLTFGGGTKVEIKRTVAAPSVFIFPPSDEQLKSGTASVVCLLNNFYPREAKVQWKVDNALQSGNSQESVTEQDSKDSTYSLSSTLTLSKADYEKHKVYACEVTHQGLSSPVTKSFNRGECGGGGSGGGGSGGGGSGGGGSDIQMTQSPSSLSASVGDRVTITCQASQNIYVWLNWYQQKPGKAPKLLIYKASNLHTGVPSRFSGSGSGTDFTLTISSLQPEDIATYYCQQGQTYPYTFGQGTKLEIKGGGGSGGGGSGGGGSGGGGSQVQLVQSGAEVVKPGASVKVSCKASGYTFTSYYIHWVRQAPGQGLEWIGSIYPGNVNTNYAQKFQGRATLTVDTSISTAYMELSRLRSDDTAVYYCTRSHYGLDWNFDVWGKGTTVTVSS

SEQ ID NO: 374 - protein, 586 aa, Artificial Sequence; identical to SEQ ID NO: 236
  Synthetic

SEQ ID NO: 375 - protein, 570 aa, Artificial Sequence; identical to SEQ ID NO: 237
  Synthetic

SEQ ID NO: 376 - protein, 480 aa, Artificial Sequence
  Synthetic
EIVLTQSPATLSLSPGERATLSCRASSSVSYMHWYQQKPGQAPRPWIYATSNLASGIPARFSGSRSGTDYTLTISSLEPEDFAVYYCQQWSSNTLTFGGGTKVEIKRTVAAPSVFIFPPSDEQLKSGTASVVCLLNNFYPREAKVQWKVDNALQSGNSQESVTEQDSKDSTYSLSSTLTLSKADYEKHKVYACEVTHQGLSSPVTKSFNRGECGGGGSGGGGSGGGGSGGGGSQVQLVQSGAEVVKPGASVKVSCKASGYTFTSYYIHWVRQAPGQGLEWIGSIYPGNVNTNYAQKFQGRATLTVDTSISTAYMELSRLRSDDTAVYYCTRSHYGLDWNFDVWGKGTTVTVSSGGGGSGGGGSGGGGSGGGGSDIQMTQSPSSLSASVGDRVTITCQASQNIYVWLNWYQQKPGKAPKLLIYKASNLHTGVPSRFSGSGSGTDFTLTISSLQPEDIATYYCQQGQTYPYTFGQGTKLEIK

SEQ ID NO: 377 - protein, 716 aa, Artificial Sequence; identical to SEQ ID NO: 304
  Synthetic

SEQ ID NO: 378 - protein, 714 aa, Artificial Sequence; identical to SEQ ID NO: 243
  Synthetic

SEQ ID NO: 379 - protein, 213 aa, Artificial Sequence; identical to SEQ ID NO: 42
  Synthetic

SEQ ID NO: 380 - protein, 716 aa, Artificial Sequence; identical to SEQ ID NO: 308
  Synthetic

SEQ ID NO: 381 - protein, 714 aa, Artificial Sequence; identical to SEQ ID NO: 243
  Synthetic

SEQ ID NO: 382 - protein, 213 aa, Artificial Sequence; identical to SEQ ID NO: 42
  Synthetic

SEQ ID NO: 383 - protein, 586 aa, Artificial Sequence; identical to SEQ ID NO: 245
  Synthetic

SEQ ID NO: 384 - protein, 573 aa, Artificial Sequence
  Synthetic
QVQLVQSGAEVKKPGASVKVSCKASGYTFTSYYIHWVRQAPGQGLEWIGCIYPGNVNTNYNEKFKDRATLTVDTSISTAYMELSRLRSDDTAVYFCTRSHYGLDWNFDVWGQGTTVTVSSASVAAPSVFIFPPSDEQLKSGTASVVCLLNNFYPREAKVQWKVDNALQSGNSQESVTEQDSKDSTYSLSSTLTLSKADYEKHKVYACEVTHQGLSSPVTKSFNRGECGGGGSGGGGSGGGGSGGGGSQAVVTQEPSLTVSPGGTVTLTCRSSTGAVTTSNYANWVQQKPGQAPRGLIGGTNKRAPWTPARFSGSLLGGKAALTITGAQAEDEADYYCALWYSNLWVFGGGTKLTVLPAPELLGPSVFLFPPKPKDTLMISRTPEVTCVVVDVSHEDPEVKFNWYVDGVEVHNAKTKPREEQYNSTYRVVSVLTVLHQDWLNGKEYKCKVSNKALPAPIEKTISKAKGQPREPQVYTLPPSREEMTKNQVSLSCAVKGFYPSDIAVEWESNGQPENNYKTTPPVLDSDGSFFLVSKLTVDKSRWQQGNVFSCSVMHEALHNRFTQKSLSLSPGK

SEQ ID NO: 385 - protein, 213 aa, Artificial Sequence; identical to SEQ ID NO: 42
  Synthetic

SEQ ID NO: 386 - protein, 212 aa, Artificial Sequence
  Synthetic
DIQMTQSPSSLSASVGDRVTITCHASQNIYVWLNWYQQKPGKAPKLLIYKASNLHTGVPSRFSGSGSGTDFTLTISSLQPEDFATYYCQQGQTYPYTFGGGTKVEIKSSASTKGPSVFPLAPSSKSTSGGTAALGCLVKDYFPEPVTVSWNSGALTSGVHTFPAVLQSSGLYSLSSVVTVPSSSLGTQTYICNVNHKPSNTKVDKKVEPKSC

SEQ ID NO: 387 - protein, 716 aa, Artificial Sequence
  Synthetic
QVQLVQSGAEVKKPGASVKVSCKASGYTFTSYVMHWVRQKPGQGLEWIGYINPYNEGTESTDKFKGRATMTSDKSTSTVYMELSSLRSEDTAVYYCASIYYGYEGTYFGVWGQGTLVTVSSASTKGPSVFPLAPSSKSTSGGTAALGCLVKDYFPEPVTVSWNSGALTSGVHTFPAVLQSSGLYSLSSVVTVPSSSLGTQTYICNVNHKPSNTKVDKKVEPKSCDKTHTCPPCPAPEAAGPSVFLFPPKPKDTLMISRTPEVTCVVVDVSHEDPEVKFNWYVDGVEVHNAKTKPREEQYNSTYRVVSVLTVLHQDWLNGKEYKCKVSNKALPAPIEKTISKAKGQPREPQVYTLPPSREEMTKNQVSLWCLVKGFYPSDIAVEWESNGQPENNYKTTPPVLDSDGSFFLYSKLTVDKSRWQQGNVFSCSVMHEALHNHYTQKSLSLSPGGGGGSGGGGSGGGGSGGGGSDIQMTQSPSSLSASVGDRVTITCHASQNIYVWLNWYQQKPGKAPKLLIYKASNLHTGVPSRFSGSGSGTDFTLTISSLQPEDFATYYCQQGQTYPYTFGGGTKVEIKGGGGSGGGGSGGGGSGGGGSQVQLVQSGAEVKKPGASVKVSCKASGYTFTSYYIHWVRQAPGQGLEWIGCIYPGNVNTNYNEKFKDRATLTVDTSISTAYMELSRLRSDDTAVYFCTRSHYGLDWNFDVWGQGTTVTVSS

SEQ ID NO: 388 - protein, 968 aa, Artificial Sequence
  Synthetic
QVQLVQSGAEVKKPGASVKVSCKASGYTFTSYVMHWVRQKPGQGLEWIGYINPYNEGTESTDKFKGRATMTSDKSTSTVYMELSSLRSEDTAVYYCASIYYGYEGTYFGVWGQGTLVTVSSASTKGPSVFPLAPSSKSTSGGTAALGCLVKDYFPEPVTVSWNSGALTSGVHTFPAVLQSSGLYSLSSVVTVPSSSLGTQTYICNVNHKPSNTKVDKKVEPKSCGGGGSGGGGSGGGGSGGGGSEVQLVESGGGLVQPGGSLRLSCAASGFTFSTYAMNWVRQAPGKGLEWVGRIRSKYNNYATYYADSVKGRFTISRDDSKNSLYLQMNSLKTEDTAVYYCVRHGNFGNSYVSWFAYWGQGTLVTVSSASVAAPSVFIFPPSDEQLKSGTASVVCLLNNFYPREAKVQWKVDNALQSGNSQESVTEQDSKDSTYSLSSTLTLSKADYEKHKVYACEVTHQGLSSPVTKSFNRGECDKTHTCPPCPAPEAAGPSVFLFPPKPKDTLMISRTPEVTCVVVDVSHEDPEVKFNWYVDGVEVHNAKTKPREEQYNSTYRVVSVLTVLHQDWLNGKEYKCKVSNKALPAPIEKTISKAKGQPREPQVYTLPPSREEMTKNQVSLSCAVKGFYPSDIAVEWESNGQPENNYKTTPPVLDSDGSFFLVSKLTVDKSRWQQGNVFSCSVMHEALHNRFTQKSLSLSPGGGGGSGGGGSGGGGSGGGGSDIQMTQSPSSLSASVGDRVTITCHASQNIYVWLNWYQQKPGKAPKLLIYKASNLHTGVPSRFSGSGSGTDFTLTISSLQPEDFATYYCQQGQTYPYTFGGGTKVEIKGGGGSGGGGSGGGGSGGGGSQVQLVQSGAEVKKPGASVKVSCKASGYTFTSYYIHWVRQAPGQGLEWIGCIYPGNVNTNYNEKFKDRATLTVDTSISTAYMELSRLRSDDTAVYFCTRSHYGLDWNFDVWGQGTTVTVSS

SEQ ID NO: 389 - protein, 213 aa, Artificial Sequence; identical to SEQ ID NO: 42
  Synthetic

SEQ ID NO: 390 - protein, 214 aa, Artificial Sequence; identical to SEQ ID NO: 232
  Synthetic

SEQ ID NO: 391 - protein, 716 aa, Artificial Sequence
  Synthetic
QVQLVQSGAEVKKPGASVKVSCKASGYTFTSYVMHWVRQKPGQGLEWIGYINPYNEGTESTDKFKGRATMTSDKSTSTVYMELSSLRSEDTAVYYCASIYYGYEGTYFGVWGQGTLVTVSSASTKGPSVFPLAPSSKSTSGGTAALGCLVKDYFPEPVTVSWNSGALTSGVHTFPAVLQSSGLYSLSSVVTVPSSSLGTQTYICNVNHKPSNTKVDKKVEPKSCDKTHTCPPCPAPEAAGPSVFLFPPKPKDTLMISRTPEVTCVVVDVSHEDPEVKFNWYVDGVEVHNAKTKPREEQYNSTYRVVSVLTVLHQDWLNGKEYKCKVSNKALPAPIEKTISKAKGQPREPQVYTLPPSREEMTKNQVSLWCLVKGFYPSDIAVEWESNGQPENNYKTTPPVLDSDGSFFLYSKLTVDKSRWQQGNVFSCSVMHEALHNHYTQKSLSLSPGGGGGSGGGGSGGGGSGGGGSQVQLVQSGAEVKKPGASVKVSCKASGYTFTSYYIHWVRQAPGQGLEWIGCIYPGNVNTNYNEKFKDRATLTVDTSISTAYMELSRLRSDDTAVYFCTRSHYGLDWNFDVWGQGTTVTVSSGGGGSGGGGSGGGGSGGGGSDIQMTQSPSSLSASVGDRVTITCHASQNIYVWLNWYQQKPGKAPKLLIYKASNLHTGVPSRFSGSGSGTDFTLTISSLQPEDFATYYCQQGQTYPYTFGGGTKVEIK

SEQ ID NO: 392 - protein, 968 aa, Artificial Sequence
  Synthetic
QVQLVQSGAEVKKPGASVKVSCKASGYTFTSYVMHWVRQKPGQGLEWIGYINPYNEGTESTDKFKGRATMTSDKSTSTVYMELSSLRSEDTAVYYCASIYYGYEGTYFGVWGQGTLVTVSSASTKGPSVFPLAPSSKSTSGGTAALGCLVKDYFPEPVTVSWNSGALTSGVHTFPAVLQSSGLYSLSSVVTVPSSSLGTQTYICNVNHKPSNTKVDKKVEPKSCGGGGSGGGGSGGGGSGGGGSEVQLVESGGGLVQPGGSLRLSCAASGFTFSTYAMNWVRQAPGKGLEWVGRIRSKYNNYATYYADSVKGRFTISRDDSKNSLYLQMNSLKTEDTAVYYCVRHGNFGNSYVSWFAYWGQGTLVTVSSASVAAPSVFIFPPSDEQLKSGTASVVCLLNNFYPREAKVQWKVDNALQSGNSQESVTEQDSKDSTYSLSSTLTLSKADYEKHKVYACEVTHQGLSSPVTKSFNRGECDKTHTCPPCPAPEAAGPSVFLFPPKPKDTLMISRTPEVTCVVVDVSHEDPEVKFNWYVDGVEVHNAKTKPREEQYNSTYRVVSVLTVLHQDWLNGKEYKCKVSNKALPAPIEKTISKAKGQPREPQVYTLPPSREEMTKNQVSLSCAVKGFYPSDIAVEWESNGQPENNYKTTPPVLDSDGSFFLVSKLTVDKSRWQQGNVFSCSVMHEALHNRFTQKSLSLSPGGGGGSGGGGSGGGGSGGGGSQVQLVQSGAEVKKPGASVKVSCKASGYTFTSYYIHWVRQAPGQGLEWIGCIYPGNVNTNYNEKFKDRATLTVDTSISTAYMELSRLRSDDTAVYFCTRSHYGLDWNFDVWGQGTTVTVSSGGGGSGGGGSGGGGSGGGGSDIQMTQSPSSLSASVGDRVTITCHASQNIYVWLNWYQQKPGKAPKLLIYKASNLHTGVPSRFSGSGSGTDFTLTISSLQPEDFATYYCQQGQTYPYTFGGGTKVEIK

SEQ ID NO: 393 - protein, 213 aa, Artificial Sequence; identical to SEQ ID NO: 42
  Synthetic

SEQ ID NO: 394 - protein, 214 aa, Artificial Sequence; identical to SEQ ID NO: 232
  Synthetic

SEQ ID NO: 395 - protein, 450 aa, Artificial Sequence; identical to SEQ ID NO: 229
  Synthetic

SEQ ID NO: 396 - protein, 968 aa, Artificial Sequence; identical to SEQ ID NO: 388
  Synthetic

SEQ ID NO: 397 - protein, 213 aa, Artificial Sequence; identical to SEQ ID NO: 42
  Synthetic

SEQ ID NO: 398 - protein, 214 aa, Artificial Sequence; identical to SEQ ID NO: 232
  Synthetic

SEQ ID NO: 399 - protein, 450 aa, Artificial Sequence; identical to SEQ ID NO: 229
  Synthetic

SEQ ID NO: 400 - protein, 968 aa, Artificial Sequence; identical to SEQ ID NO: 392
  Synthetic

SEQ ID NO: 401 - protein, 213 aa, Artificial Sequence; identical to SEQ ID NO: 42
  Synthetic

SEQ ID NO: 402 - protein, 214 aa, Artificial Sequence; identical to SEQ ID NO: 232
  Synthetic

SEQ ID NO: 403 - protein, 930 aa, Artificial Sequence
  Synthetic
QAVVTQEPSLTVSPGGTVTLTCRSSTGAVTTSNYANWVQQKPGQAPRGLIGGTNKRAPWTPARFSGSLLGGKAALTITGAQAEDEADYYCALWYSNLWVFGGGTKLTVLSSASTKGPSVFPLAPSSKSTSGGTAALGCLVKDYFPEPVTVSWNSGALTSGVHTFPAVLQSSGLYSLSSVVTVPSSSLGTQTYICNVNHKPSNTKVDKKVEPKSCQVQLVQSGAEVKKPGASVKVSCKASGYTFTSYVMHWVRQKPGQGLEWIGYINPYNEGTESTDKFKGRATMTSDKSTSTVYMELSSLRSEDTAVYYCASIYYGYEGTYFGVWGQGTLVTVSSASTKGPSVFPLAPSSKSTSGGTAALGCLVKDYFPEPVTVSWNSGALTSGVHTFPAVLQSSGLYSLSSVVTVPSSSLGTQTYICNVNHKPSNTKVDKKVEPKSCDKTHTCPPCPAPEAAGPSVFLFPPKPKDTLMISRTPEVTCVVVDVSHEDPEVKFNWYVDGVEVHNAKTKPREEQYNSTYRVVSVLTVLHQDWLNGKEYKCKVSNKALPAPIEKTISKAKGQPREPQVYTLPPSREEMTKNQVSLWCLVKGFYPSDIAVEWESNGQPENNYKTTPPVLDSDGSFFLYSKLTVDKSRWQQGNVFSCSVMHEALHNHYTQKSLSLSPGGGGGSGGGGSGGGGSGGGGSDIQMTQSPSSLSASVGDRVTITCHASQNIYVWLNWYQQKPGKAPKLLIYKASNLHTGVPSRFSGSGSGTDFTLTISSLQPEDFATYYCQQGQTYPYTFGGGTKVEIKGGGGSGGGGSGGGGSGGGGSQVQLVQSGAEVKKPGASVKVSCKASGYTFTSYYIHWVRQAPGQGLEWIGCIYPGNVNTNYNEKFKDRATLTVDTSISTAYMELSRLRSDDTAVYFCTRSHYGLDWNFDVWGQGTTVTVSS

SEQ ID NO: 404 - protein, 702 aa, Artificial Sequence; identical to SEQ ID NO: 230
  Synthetic

SEQ ID NO: 405 - protein, 213 aa, Artificial Sequence; identical to SEQ ID NO: 42
  Synthetic

SEQ ID NO: 406 - protein, 214 aa, Artificial Sequence; identical to SEQ ID NO: 232
  Synthetic

SEQ ID NO: 407 - protein, 716 aa, Artificial Sequence; identical to SEQ ID NO: 391
  Synthetic

SEQ ID NO: 408 - protein, 702 aa, Artificial Sequence; identical to SEQ ID NO: 230
  Synthetic

SEQ ID NO: 409 - protein, 213 aa, Artificial Sequence; identical to SEQ ID NO: 42
  Synthetic

SEQ ID NO: 410 - protein, 214 aa, Artificial Sequence; identical to SEQ ID NO: 232
  Synthetic

SEQ ID NO: 411 - protein, 589 aa, Artificial Sequence
  Synthetic
QVQLVQSGAEVKKPGASVKVSCKASGYTFTSYVMHWVRQKPGQGLEWIGYINPYNEGTESTDKFKGRATMTSDKSTSTVYMELSSLRSEDTAVYYCASIYYGYEGTYFGVWGQGTLVTVSSASTKGPSVFPLAPSSKSTSGGTAALGCLVKDYFPEPVTVSWNSGALTSGVHTFPAVLQSSGLYSLSSVVTVPSSSLGTQTYICNVNHKPSNTKVDKKVEPKSCDKTHTCPPCPAPEAAGPSVFLFPPKPKDTLMISRTPEVTCVVVDVSHEDPEVKFNWYVDGVEVHNAKTKPREEQYNSTYRVVSVLTVLHQDWLNGKEYKCKVSNKALPAPIEKTISKAKGQPREPQVYTLPPSREEMTKNQVSLWCLVKGFYPSDIAVEWESNGQPENNYKTTPPVLDSDGSFFLYSKLTVDKSRWQQGNVFSCSVMHEALHNHYTQKSLSLSPGGGGGSGGGGSGGGGSGGGGSQVQLVQSGAEVKKPGASVKVSCKASGYTFTSYYIHWVRQAPGQGLEWIGCIYPGNVNTNYNEKFKDRATLTVDTSISTAYMELSRLRSDDTAVYFCTRSHYGLDWNFDVWGQGTTVTVSS

SEQ ID NO: 412 - protein, 828 aa, Artificial Sequence
  Synthetic
QVQLVQSGAEVKKPGASVKVSCKASGYTFTSYVMHWVRQKPGQGLEWIGYINPYNEGTESTDKFKGRATMTSDKSTSTVYMELSSLRSEDTAVYYCASIYYGYEGTYFGVWGQGTLVTVSSASTKGPSVFPLAPSSKSTSGGTAALGCLVKDYFPEPVTVSWNSGALTSGVHTFPAVLQSSGLYSLSSVVTVPSSSLGTQTYICNVNHKPSNTKVDKKVEPKSCGGGGSGGGGSGGGGSGGGGSEVQLVESGGGLVQPGGSLRLSCAASGFTFSTYAMNWVRQAPGKGLEWVGRIRSKYNNYATYYADSVKGRFTISRDDSKNSLYLQMNSLKTEDTAVYYCVRHGNFGNSYVSWFAYWGQGTLVTVSSASVAAPSVFIFPPSDEQLKSGTASVVCLLNNFYPREAKVQWKVDNALQSGNSQESVTEQDSKDSTYSLSSTLTLSKADYEKHKVYACEVTHQGLSSPVTKSFNRGECDKTHTCPPCPAPEAAGPSVFLFPPKPKDTLMISRTPEVTCVVVDVSHEDPEVKFNWYVDGVEVHNAKTKPREEQYNSTYRVVSVLTVLHQDWLNGKEYKCKVSNKALPAPIEKTISKAKGQPREPQVYTLPPSREEMTKNQVSLSCAVKGFYPSDIAVEWESNGQPENNYKTTPPVLDSDGSFFLVSKLTVDKSRWQQGNVFSCSVMHEALHNRFTQKSLSLSPGGGGGSGGGGSGGGGSGGGGSDIQMTQSPSSLSASVGDRVTITCHASQNIYVWLNWYQQKPGKAPKLLIYKASNLHTGVPSRFSGSGSGTDFTLTISSLQPEDFATYYCQQGQTYPYTFGGGTKVEIK

SEQ ID NO: 413 - protein, 213 aa, Artificial Sequence; identical to SEQ ID NO: 42
  Synthetic

SEQ ID NO: 414 - protein, 214 aa, Artificial Sequence; identical to SEQ ID NO: 232
  Synthetic

SEQ ID NO: 415 - protein, 716 aa, Artificial Sequence; identical to SEQ ID NO: 387
  Synthetic

SEQ ID NO: 416 - protein, 724 aa, Artificial Sequence; identical to SEQ ID NO: 234
  Synthetic

SEQ ID NO: 417 - protein, 213 aa, Artificial Sequence; identical to SEQ ID NO: 42
  Synthetic

SEQ ID NO: 418 - protein, 716 aa, Artificial Sequence; identical to SEQ ID NO: 391
  Synthetic

SEQ ID NO: 419 - protein, 724 aa, Artificial Sequence; identical to SEQ ID NO: 234
  Synthetic

SEQ ID NO: 420 - protein, 213 aa, Artificial Sequence; identical to SEQ ID NO: 42
  Synthetic

SEQ ID NO: 421 - protein, 716 aa, Artificial Sequence; identical to SEQ ID NO: 387
  Synthetic

SEQ ID NO: 422 - protein, 990 aa, Artificial Sequence
  Synthetic
QVQLVQSGAEVKKPGASVKVSCKASGYTFTSYVMHWVRQKPGQGLEWIGYINPYNEGTESTDKFKGRATMTSDKSTSTVYMELSSLRSEDTAVYYCASIYYGYEGTYFGVWGQGTLVTVSSASTKGPSVFPLAPSSKSTSGGTAALGCLVKDYFPEPVTVSWNSGALTSGVHTFPAVLQSSGLYSLSSVVTVPSSSLGTQTYICNVNHKPSNTKVDKKVEPKSCGGGGSGGGGSGGGGSGGGGSQAVVTQEPSLTVSPGGTVTLTCRSSTGAVTTSNYANWVQQKPGQAPRGLIGGTNKRAPWTPARFSGSLLGGKAALTITGAQAEDEADYYCALWYSNLWVFGGGTKLTVLGGGGSGGGGSGGGGSGGGGSEVQLVESGGGLVQPGGSLRLSCAASGFTFSTYAMNWVRQAPGKGLEWVGRIRSKYNNYATYYADSVKGRFTISRDDSKNSLYLQMNSLKTEDTAVYYCVRHGNFGNSYVSWFAYWGQGTLVTVSSDKTHTCPPCPAPEAAGPSVFLFPPKPKDTLMISRTPEVTCVVVDVSHEDPEVKFNWYVDGVEVHNAKTKPREEQYNSTYRVVSVLTVLHQDWLNGKEYKCKVSNKALPAPIEKTISKAKGQPREPQVYTLPPSREEMTKNQVSLSCAVKGFYPSDIAVEWESNGQPENNYKTTPPVLDSDGSFFLVSKLTVDKSRWQQGNVFSCSVMHEALHNRFTQKSLSLSPGGGGGSGGGGSGGGGSGGGGSDIQMTQSPSSLSASVGDRVTITCHASQNIYVWLNWYQQKPGKAPKLLIYKASNLHTGVPSRFSGSGSGTDFTLTISSLQPEDFATYYCQQGQTYPYTFGGGTKVEIKGGGGSGGGGSGGGGSGGGGSQVQLVQSGAEVKKPGASVKVSCKASGYTFTSYYIHWVRQAPGQGLEWIGCIYPGNVNTNYNEKFKDRATLTVDTSISTAYMELSRLRSDDTAVYFCTRSHYGLDWNFDVWGQGTTVTVSS

SEQ ID NO: 423 - protein, 213 aa, Artificial Sequence; identical to SEQ ID NO: 42
  Synthetic

SEQ ID NO: 424 - protein, 716 aa, Artificial Sequence; identical to SEQ ID NO: 391
  Synthetic

SEQ ID NO: 425 - protein, 990 aa, Artificial Sequence
  Synthetic
QVQLVQSGAEVKKPGASVKVSCKASGYTFTSYVMHWVRQKPGQGLEWIGYINPYNEGTESTDKFKGRATMTSDKSTSTVYMELSSLRSEDTAVYYCASIYYGYEGTYFGVWGQGTLVTVSSASTKGPSVFPLAPSSKSTSGGTAALGCLVKDYFPEPVTVSWNSGALTSGVHTFPAVLQSSGLYSLSSVVTVPSSSLGTQTYICNVNHKPSNTKVDKKVEPKSCGGGGSGGGGSGGGGSGGGGSQAVVTQEPSLTVSPGGTVTLTCRSSTGAVTTSNYANWVQQKPGQAPRGLIGGTNKRAPWTPARFSGSLLGGKAALTITGAQAEDEADYYCALWYSNLWVFGGGTKLTVLGGGGSGGGGSGGGGSGGGGSEVQLVESGGGLVQPGGSLRLSCAASGFTFSTYAMNWVRQAPGKGLEWVGRIRSKYNNYATYYADSVKGRFTISRDDSKNSLYLQMNSLKTEDTAVYYCVRHGNFGNSYVSWFAYWGQGTLVTVSSDKTHTCPPCPAPEAAGPSVFLFPPKPKDTLMISRTPEVTCVVVDVSHEDPEVKFNWYVDGVEVHNAKTKPREEQYNSTYRVVSVLTVLHQDWLNGKEYKCKVSNKALPAPIEKTISKAKGQPREPQVYTLPPSREEMTKNQVSLSCAVKGFYPSDIAVEWESNGQPENNYKTTPPVLDSDGSFFLVSKLTVDKSRWQQGNVFSCSVMHEALHNRFTQKSLSLSPGGGGGSGGGGSGGGGSGGGGSQVQLVQSGAEVKKPGASVKVSCKASGYTFTSYYIHWVRQAPGQGLEWIGCIYPGNVNTNYNEKFKDRATLTVDTSISTAYMELSRLRSDDTAVYFCTRSHYGLDWNFDVWGQGTTVTVSSGGGGSGGGGSGGGGSGGGGSDIQMTQSPSSLSASVGDRVTITCHASQNIYVWLNWYQQKPGKAPKLLIYKASNLHTGVPSRFSGSGSGTDFTLTISSLQPEDFATYYCQQGQTYPYTFGGGTKVEIK

SEQ ID NO: 426 - protein, 213 aa, Artificial Sequence; identical to SEQ ID NO: 42
  Synthetic

SEQ ID NO: 427 - protein, 450 aa, Artificial Sequence; identical to SEQ ID NO: 229
  Synthetic

SEQ ID NO: 428 - protein, 990 aa, Artificial Sequence; identical to SEQ ID NO: 422
  Synthetic

SEQ ID NO: 429 - protein, 213 aa, Artificial Sequence; identical to SEQ ID NO: 42
  Synthetic

SEQ ID NO: 430 - protein, 450 aa, Artificial Sequence; identical to SEQ ID NO: 229
  Synthetic

SEQ ID NO: 431 - protein, 990 aa, Artificial Sequence; identical to SEQ ID NO: 425
  Synthetic

SEQ ID NO: 432 - protein, 213 aa, Artificial Sequence; identical to SEQ ID NO: 42
  Synthetic

SEQ ID NO: 433 - protein, 852 aa, Artificial Sequence
  Synthetic
QVQLVQSGAEVKKPGASVKVSCKASGYTFTSYVMHWVRQKPGQGLEWIGYINPYNEGTESTDKFKGRATMTSDKSTSTVYMELSSLRSEDTAVYYCASIYYGYEGTYFGVWGQGTLVTVSSASTKGPSVFPLAPSSKSTSGGTAALGCLVKDYFPEPVTVSWNSGALTSGVHTFPAVLQSSGLYSLSSVVTVPSSSLGTQTYICNVNHKPSNTKVDKKVEPKSCGGGGSGGGGSGGGGSGGGGSEVQLVESGGGLVQPGGSLRLSCAASGFTFSTYAMNWVRQAPGKGLEWVGRIRSKYNNYATYYADSVKGRFTISRDDSKNSLYLQMNSLKTEDTAVYYCVRHGNFGNSYVSWFAYWGQGTLVTVSSPAPEAAGPSVFLFPPKPKDTLMISRTPEVTCVVVDVSHEDPEVKFNWYVDGVEVHNAKTKPREEQYNSTYRVVSVLTVLHQDWLNGKEYKCKVSNKALPAPIEKTISKAKGQPREPQVYTLPPSREEMTKNQVSLWCLVKGFYPSDIAVEWESNGQPENNYKTTPPVLDSDGSFFLYSKLTVDKSRWQQGNVFSCSVMHEALHNHYTQKSLSLSPGGGGGSGGGGSGGGGSGGGGSDIQMTQSPSSLSASVGDRVTITCHASQNIYVWLNWYQQKPGKAPKLLIYKASNLHTGVPSRFSGSGSGTDFTLTISSLQPEDFATYYCQQGQTYPYTFGGGTKVEIKGGGGSGGGGSGGGGSGGGGSQVQLVQSGAEVKKPGASVKVSCKASGYTFTSYYIHWVRQAPGQGLEWIGCIYPGNVNTNYNEKFKDRATLTVDTSISTAYMELSRLRSDDTAVYFCTRSHYGLDWNFDVWGQGTTVTVSS

SEQ ID NO: 434 - protein, 836 aa, Artificial Sequence
  Synthetic
QVQLVQSGAEVKKPGASVKVSCKASGYTFTSYVMHWVRQKPGQGLEWIGYINPYNEGTESTDKFKGRATMTSDKSTSTVYMELSSLRSEDTAVYYCASIYYGYEGTYFGVWGQGTLVTVSSASTKGPSVFPLAPSSKSTSGGTAALGCLVKDYFPEPVTVSWNSGALTSGVHTFPAVLQSSGLYSLSSVVTVPSSSLGTQTYICNVNHKPSNTKVDKKVEPKSCGGGGSGGGGSGGGGSGGGGSQAVVTQEPSLTVSPGGTVTLTCRSSTGAVTTSNYANWVQQKPGQAPRGLIGGTNKRAPWTPARFSGSLLGGKAALTITGAQAEDEADYYCALWYSNLWVFGGGTKLTVLPAPEAAGPSVFLFPPKPKDTLMISRTPEVTCVVVDVSHEDPEVKFNWYVDGVEVHNAKTKPREEQYNSTYRVVSVLTVLHQDWLNGKEYKCKVSNKALPAPIEKTISKAKGQPREPQVYTLPPSREEMTKNQVSLSCAVKGFYPSDIAVEWESNGQPENNYKTTPPVLDSDGSFFLVSKLTVDKSRWQQGNVFSCSVMHEALHNRFTQKSLSLSPGGGGGSGGGGSGGGGSGGGGSDIQMTQSPSSLSASVGDRVTITCHASQNIYVWLNWYQQKPGKAPKLLIYKASNLHTGVPSRFSGSGSGTDFTLTISSLQPEDFATYYCQQGQTYPYTFGGGTKVEIKGGGGSGGGGSGGGGSGGGGSQVQLVQSGAEVKKPGASVKVSCKASGYTFTSYYIHWVRQAPGQGLEWIGCIYPGNVNTNYNEKFKDRATLTVDTSISTAYMELSRLRSDDTAVYFCTRSHYGLDWNFDVWGQGTTVTVSS

SEQ ID NO: 435 - protein, 213 aa, Artificial Sequence; identical to SEQ ID NO: 42
  Synthetic

SEQ ID NO: 436 - protein, 852 aa, Artificial Sequence
  Synthetic
QVQLVQSGAEVKKPGASVKVSCKASGYTFTSYVMHWVRQKPGQGLEWIGYINPYNEGTESTDKFKGRATMTSDKSTSTVYMELSSLRSEDTAVYYCASIYYGYEGTYFGVWGQGTLVTVSSASTKGPSVFPLAPSSKSTSGGTAALGCLVKDYFPEPVTVSWNSGALTSGVHTFPAVLQSSGLYSLSSVVTVPSSSLGTQTYICNVNHKPSNTKVDKKVEPKSCGGGGSGGGGSGGGGSGGGGSEVQLVESGGGLVQPGGSLRLSCAASGFTFSTYAMNWVRQAPGKGLEWVGRIRSKYNNYATYYADSVKGRFTISRDDSKNSLYLQMNSLKTEDTAVYYCVRHGNFGNSYVSWFAYWGQGTLVTVSSPAPEAAGPSVFLFPPKPKDTLMISRTPEVTCVVVDVSHEDPEVKFNWYVDGVEVHNAKTKPREEQYNSTYRVVSVLTVLHQDWLNGKEYKCKVSNKALPAPIEKTISKAKGQPREPQVYTLPPSREEMTKNQVSLWCLVKGFYPSDIAVEWESNGQPENNYKTTPPVLDSDGSFFLYSKLTVDKSRWQQGNVFSCSVMHEALHNHYTQKSLSLSPGGGGGSGGGGSGGGGSGGGGSQVQLVQSGAEVKKPGASVKVSCKASGYTFTSYYIHWVRQAPGQGLEWIGCIYPGNVNTNYNEKFKDRATLTVDTSISTAYMELSRLRSDDTAVYFCTRSHYGLDWNFDVWGQGTTVTVSSGGGGSGGGGSGGGGSGGGGSDIQMTQSPSSLSASVGDRVTITCHASQNIYVWLNWYQQKPGKAPKLLIYKASNLHTGVPSRFSGSGSGTDFTLTISSLQPEDFATYYCQQGQTYPYTFGGGTKVEIK

SEQ ID NO: 437 - protein, 836 aa, Artificial Sequence
  Synthetic
QVQLVQSGAEVKKPGASVKVSCKASGYTFTSYVMHWVRQKPGQGLEWIGYINPYNEGTESTDKFKGRATMTSDKSTSTVYMELSSLRSEDTAVYYCASIYYGYEGTYFGVWGQGTLVTVSSASTKGPSVFPLAPSSKSTSGGTAALGCLVKDYFPEPVTVSWNSGALTSGVHTFPAVLQSSGLYSLSSVVTVPSSSLGTQTYICNVNHKPSNTKVDKKVEPKSCGGGGSGGGGSGGGGSGGGGSQAVVTQEPSLTVSPGGTVTLTCRSSTGAVTTSNYANWVQQKPGQAPRGLIGGTNKRAPWTPARFSGSLLGGKAALTITGAQAEDEADYYCALWYSNLWVFGGGTKLTVLPAPEAAGPSVFLFPPKPKDTLMISRTPEVTCVVVDVSHEDPEVKFNWYVDGVEVHNAKTKPREEQYNSTYRVVSVLTVLHQDWLNGKEYKCKVSNKALPAPIEKTISKAKGQPREPQVYTLPPSREEMTKNQVSLSCAVKGFYPSDIAVEWESNGQPENNYKTTPPVLDSDGSFFLVSKLTVDKSRWQQGNVFSCSVMHEALHNRFTQKSLSLSPGGGGGSGGGGSGGGGSGGGGSQVQLVQSGAEVKKPGASVKVSCKASGYTFTSYYIHWVRQAPGQGLEWIGCIYPGNVNTNYNEKFKDRATLTVDTSISTAYMELSRLRSDDTAVYFCTRSHYGLDWNFDVWGQGTTVTVSSGGGGSGGGGSGGGGSGGGGSDIQMTQSPSSLSASVGDRVTITCHASQNIYVWLNWYQQKPGKAPKLLIYKASNLHTGVPSRFSGSGSGTDFTLTISSLQPEDFATYYCQQGQTYPYTFGGGTKVEIK

SEQ ID NO: 438 - protein, 213 aa, Artificial Sequence; identical to SEQ ID NO: 42
  Synthetic

SEQ ID NO: 439 - protein, 852 aa, Artificial Sequence; identical to SEQ ID NO: 433
  Synthetic

SEQ ID NO: 440 - protein, 570 aa, Artificial Sequence; identical to SEQ ID NO: 237
  Synthetic

SEQ ID NO: 441 - protein, 213 aa, Artificial Sequence; identical to SEQ ID NO: 42
  Synthetic

SEQ ID NO: 442 - protein, 852 aa, Artificial Sequence; identical to SEQ ID NO: 436
  Synthetic

SEQ ID NO: 443 - protein, 570 aa, Artificial Sequence; identical to SEQ ID NO: 237
  Synthetic

SEQ ID NO: 444 - protein, 213 aa, Artificial Sequence; identical to SEQ ID NO: 42
  Synthetic

SEQ ID NO: 445 - protein, 586 aa, Artificial Sequence; identical to SEQ ID NO: 236
  Synthetic

SEQ ID NO: 446 - protein, 836 aa, Artificial Sequence; identical to SEQ ID NO: 434
  Synthetic

SEQ ID NO: 447 - protein, 213 aa, Artificial Sequence; identical to SEQ ID NO: 42
  Synthetic

SEQ ID NO: 448 - protein, 586 aa, Artificial Sequence; identical to SEQ ID NO: 236
  Synthetic

SEQ ID NO: 449 - protein, 836 aa, Artificial Sequence; identical to SEQ ID NO: 437
  Synthetic

SEQ ID NO: 450 - protein, 213 aa, Artificial Sequence; identical to SEQ ID NO: 42
  Synthetic

SEQ ID NO: 451 - protein, 725 aa, Artificial Sequence
  Synthetic
QVQLVQSGAEVKKPGASVKVSCKASGYTFTSYVMHWVRQKPGQGLEWIGYINPYNEGTESTDKFKGRATMTSDKSTSTVYMELSSLRSEDTAVYYCASIYYGYEGTYFGVWGQGTLVTVSSASTKGPSVFPLAPSSKSTSGGTAALGCLVKDYFPEPVTVSWNSGALTSGVHTFPAVLQSSGLYSLSSVVTVPSSSLGTQTYICNVNHKPSNTKVDKKVEPKSCGGGGSGGGGSGGGGSGGGGSEVQLVESGGGLVQPGGSLRLSCAASGFTFSTYAMNWVRQAPGKGLEWVGRIRSKYNNYATYYADSVKGRFTISRDDSKNSLYLQMNSLKTEDTAVYYCVRHGNFGNSYVSWFAYWGQGTLVTVSSPAPEAAGPSVFLFPPKPKDTLMISRTPEVTCVVVDVSHEDPEVKFNWYVDGVEVHNAKTKPREEQYNSTYRVVSVLTVLHQDWLNGKEYKCKVSNKALPAPIEKTISKAKGQPREPQVYTLPPSREEMTKNQVSLWCLVKGFYPSDIAVEWESNGQPENNYKTTPPVLDSDGSFFLYSKLTVDKSRWQQGNVFSCSVMHEALHNHYTQKSLSLSPGGGGGSGGGGSGGGGSGGGGSQVQLVQSGAEVKKPGASVKVSCKASGYTFTSYYIHWVRQAPGQGLEWIGCIYPGNVNTNYNEKFKDRATLTVDTSISTAYMELSRLRSDDTAVYFCTRSHYGLDWNFDVWGQGTTVTVSS

SEQ ID NO: 452 - protein, 696 aa, Artificial Sequence
  Synthetic
QVQLVQSGAEVKKPGASVKVSCKASGYTFTSYVMHWVRQKPGQGLEWIGYINPYNEGTESTDKFKGRATMTSDKSTSTVYMELSSLRSEDTAVYYCASIYYGYEGTYFGVWGQGTLVTVSSASTKGPSVFPLAPSSKSTSGGTAALGCLVKDYFPEPVTVSWNSGALTSGVHTFPAVLQSSGLYSLSSVVTVPSSSLGTQTYICNVNHKPSNTKVDKKVEPKSCGGGGSGGGGSGGGGSGGGGSQAVVTQEPSLTVSPGGTVTLTCRSSTGAVTTSNYANWVQQKPGQAPRGLIGGTNKRAPWTPARFSGSLLGGKAALTITGAQAEDEADYYCALWYSNLWVFGGGTKLTVLPAPEAAGPSVFLFPPKPKDTLMISRTPEVTCVVVDVSHEDPEVKFNWYVDGVEVHNAKTKPREEQYNSTYRVVSVLTVLHQDWLNGKEYKCKVSNKALPAPIEKTISKAKGQPREPQVYTLPPSREEMTKNQVSLSCAVKGFYPSDIAVEWESNGQPENNYKTTPPVLDSDGSFFLVSKLTVDKSRWQQGNVFSCSVMHEALHNRFTQKSLSLSPGGGGGSGGGGSGGGGSGGGGSDIQMTQSPSSLSASVGDRVTITCHASQNIYVWLNWYQQKPGKAPKLLIYKASNLHTGVPSRFSGSGSGTDFTLTISSLQPEDFATYYCQQGQTYPYTFGGGTKVEIK

SEQ ID NO: 453 - protein, 213 aa, Artificial Sequence; identical to SEQ ID NO: 42
  Synthetic

SEQ ID NO: 454 - protein, 586 aa, Artificial Sequence; identical to SEQ ID NO: 236
  Synthetic

SEQ ID NO: 455 - protein, 570 aa, Artificial Sequence; identical to SEQ ID NO: 237
  Synthetic

SEQ ID NO: 456 - protein, 480 aa, Artificial Sequence
  Synthetic
EIVLTQSPATLSLSPGERATLSCRASSSVSYMHWYQQKPGQAPRPWIYATSNLASGIPARFSGSRSGTDYTLTISSLEPEDFAVYYCQQWSSNTLTFGGGTKVEIKRTVAAPSVFIFPPSDEQLKSGTASVVCLLNNFYPREAKVQWKVDNALQSGNSQESVTEQDSKDSTYSLSSTLTLSKADYEKHKVYACEVTHQGLSSPVTKSFNRGECGGGGSGGGGSGGGGSGGGGSDIQMTQSPSSLSASVGDRVTITCHASQNIYVWLNWYQQKPGKAPKLLIYKASNLHTGVPSRFSGSGSGTDFTLTISSLQPEDFATYYCQQGQTYPYTFGGGTKVEIKGGGGSGGGGSGGGGSGGGGSQVQLVQSGAEVKKPGASVKVSCKASGYTFTSYYIHWVRQAPGQGLEWIGCIYPGNVNTNYNEKFKDRATLTVDTSISTAYMELSRLRSDDTAVYFCTRSHYGLDWNFDVWGQGTTVTVSS

SEQ ID NO: 457 - protein, 586 aa, Artificial Sequence; identical to SEQ ID NO: 236
  Synthetic

SEQ ID NO: 458 - protein, 570 aa, Artificial Sequence; identical to SEQ ID NO: 237
  Synthetic

SEQ ID NO: 459 - protein, 480 aa, Artificial Sequence
  Synthetic
EIVLTQSPATLSLSPGERATLSCRASSSVSYMHWYQQKPGQAPRPWIYATSNLASGIPARFSGSRSGTDYTLTISSLEPEDFAVYYCQQWSSNTLTFGGGTKVEIKRTVAAPSVFIFPPSDEQLKSGTASVVCLLNNFYPREAKVQWKVDNALQSGNSQESVTEQDSKDSTYSLSSTLTLSKADYEKHKVYACEVTHQGLSSPVTKSFNRGECGGGGSGGGGSGGGGSGGGGSQVQLVQSGAEVKKPGASVKVSCKASGYTFTSYYIHWVRQAPGQGLEWIGCIYPGNVNTNYNEKFKDRATLTVDTSISTAYMELSRLRSDDTAVYFCTRSHYGLDWNFDVWGQGTTVTVSSGGGGSGGGGSGGGGSGGGGSDIQMTQSPSSLSASVGDRVTITCHASQNIYVWLNWYQQKPGKAPKLLIYKASNLHTGVPSRFSGSGSGTDFTLTISSLQPEDFATYYCQQGQTYPYTFGGGTKVEIK

SEQ ID NO: 460 - protein, 716 aa, Artificial Sequence; identical to SEQ ID NO: 387
  Synthetic

SEQ ID NO: 461 - protein, 714 aa, Artificial Sequence; identical to SEQ ID NO: 243
  Synthetic

SEQ ID NO: 462 - protein, 213 aa, Artificial Sequence; identical to SEQ ID NO: 42
  Synthetic

SEQ ID NO: 463 - protein, 716 aa, Artificial Sequence; identical to SEQ ID NO: 391
  Synthetic

SEQ ID NO: 464 - protein, 714 aa, Artificial Sequence; identical to SEQ ID NO: 243
  Synthetic

SEQ ID NO: 465 - protein, 213 aa, Artificial Sequence; identical to SEQ ID NO: 42
  Synthetic

SEQ ID NO: 466 - protein, 586 aa, Artificial Sequence; identical to SEQ ID NO: 245
  Synthetic

SEQ ID NO: 467 - protein, 575 aa, Artificial Sequence
  Synthetic
QVQLQESGPGLVKPSETLSLTCTVSGGSISSYYWSWIRQPPGKGLEWIGYIYYSGITHYNPSLKSRVTISVDTSKIQFSLKLSSVTAADTAVYYCARWGVRRDYYYYGMDVWGQGTTVTVSSASVAAPSVFIFPPSDEQLKSGTASVVCLLNNFYPREAKVQWKVDNALQSGNSQESVTEQDSKDSTYSLSSTLTLSKADYEKHKVYACEVTHQGLSSPVTKSFNRGECGGGGSGGGGSGGGGSGGGGSQAVVTQEPSLTVSPGGTVTLTCRSSTGAVTTSNYANWVQQKPGQAPRGLIGGTNKRAPWTPARFSGSLLGGKAALTITGAQAEDEADYYCALWYSNLWVFGGGTKLTVLPAPELLGPSVFLFPPKPKDTLMISRTPEVTCVVVDVSHEDPEVKFNWYVDGVEVHNAKTKPREEQYNSTYRVVSVLTVLHQDWLNGKEYKCKVSNKALPAPIEKTISKAKGQPREPQVYTLPPSREEMTKNQVSLSCAVKGFYPSDIAVEWESNGQPENNYKTTPPVLDSDGSFFLVSKLTVDKSRWQQGNVFSCSVMHEALHNRFTQKSLSLSPGK

SEQ ID NO: 468 - protein, 213 aa, Artificial Sequence; identical to SEQ ID NO: 42
  Synthetic

SEQ ID NO: 469 - protein, 213 aa, Artificial Sequence
  Synthetic
EIVLTQSPGTLSLSPGERATLSCRASQSVSSSYLAWYQQKPGQAPRLLIYGASSRATGIPDRFSGSGSGTDFTLTISRLEPEDFAVYYCQQYGSSPWTFGQGTKVEIKSSASTKGPSVFPLAPSSKSTSGGTAALGCLVKDYFPEPVTVSWNSGALTSGVHTFPAVLQSSGLYSLSSVVTVPSSSLGTQTYICNVNHKPSNTKVDKKVEPKSC

SEQ ID NO: 470 - protein, 719 aa, Artificial Sequence
  Synthetic
QVQLVQSGAEVKKPGASVKVSCKASGYTFTSYVMHWVRQKPGQGLEWIGYINPYNEGTESTDKFKGRATMTSDKSTSTVYMELSSLRSEDTAVYYCASIYYGYEGTYFGVWGQGTLVTVSSASTKGPSVFPLAPSSKSTSGGTAALGCLVKDYFPEPVTVSWNSGALTSGVHTFPAVLQSSGLYSLSSVVTVPSSSLGTQTYICNVNHKPSNTKVDKKVEPKSCDKTHTCPPCPAPEAAGPSVFLFPPKPKDTLMISRTPEVTCVVVDVSHEDPEVKFNWYVDGVEVHNAKTKPREEQYNSTYRVVSVLTVLHQDWLNGKEYKCKVSNKALPAPIEKTISKAKGQPREPQVYTLPPSREEMTKNQVSLWCLVKGFYPSDIAVEWESNGQPENNYKTTPPVLDSDGSFFLYSKLTVDKSRWQQGNVFSCSVMHEALHNHYTQKSLSLSPGGGGGSGGGGSGGGGSGGGGSEIVLTQSPGTLSLSPGERATLSCRASQSVSSSYLAWYQQKPGQAPRLLIYGASSRATGIPDRFSGSGSGTDFTLTISRLEPEDFAVYYCQQYGSSPWTFGQGTKVEIKGGGGSGGGGSGGGGSGGGGSQVQLQESGPGLVKPSETLSLTCTVSGGSISSYYWSWIRQPPGKGLEWIGYIYYSGITHYNPSLKSRVTISVDTSKIQFSLKLSSVTAADTAVYYCARWGVRRDYYYYGMDVWGQGTTVTVSS

SEQ ID NO: 471 - protein, 971 aa, Artificial Sequence
  Synthetic
QVQLVQSGAEVKKPGASVKVSCKASGYTFTSYVMHWVRQKPGQGLEWIGYINPYNEGTESTDKFKGRATMTSDKSTSTVYMELSSLRSEDTAVYYCASIYYGYEGTYFGVWGQGTLVTVSSASTKGPSVFPLAPSSKSTSGGTAALGCLVKDYFPEPVTVSWNSGALTSGVHTFPAVLQSSGLYSLSSVVTVPSSSLGTQTYICNVNHKPSNTKVDKKVEPKSCGGGGSGGGGSGGGGSGGGGSEVQLVESGGGLVQPGGSLRLSCAASGFTFSTYAMNWVRQAPGKGLEWVGRIRSKYNNYATYYADSVKGRFTISRDDSKNSLYLQMNSLKTEDTAVYYCVRHGNFGNSYVSWFAYWGQGTLVTVSSASVAAPSVFIFPPSDEQLKSGTASVVCLLNNFYPREAKVQWKVDNALQSGNSQESVTEQDSKDSTYSLSSTLTLSKADYEKHKVYACEVTHQGLSSPVTKSFNRGECDKTHTCPPCPAPEAAGPSVFLFPPKPKDTLMISRTPEVTCVVVDVSHEDPEVKFNWYVDGVEVHNAKTKPREEQYNSTYRVVSVLTVLHQDWLNGKEYKCKVSNKALPAPIEKTISKAKGQPREPQVYTLPPSREEMTKNQVSLSCAVKGFYPSDIAVEWESNGQPENNYKTTPPVLDSDGSFFLVSKLTVDKSRWQQGNVFSCSVMHEALHNRFTQKSLSLSPGGGGGSGGGGSGGGGSGGGGSEIVLTQSPGTLSLSPGERATLSCRASQSVSSSYLAWYQQKPGQAPRLLIYGASSRATGIPDRFSGSGSGTDFTLTISRLEPEDFAVYYCQQYGSSPWTFGQGTKVEIKGGGGSGGGGSGGGGSGGGGSQVQLQESGPGLVKPSETLSLTCTVSGGSISSYYWSWIRQPPGKGLEWIGYIYYSGITHYNPSLKSRVTISVDTSKIQFSLKLSSVTAADTAVYYCARWGVRRDYYYYGMDVWGQGTTVTVSS

SEQ ID NO: 472 - protein, 213 aa, Artificial Sequence; identical to SEQ ID NO: 42
  Synthetic

SEQ ID NO: 473 - protein, 214 aa, Artificial Sequence; identical to SEQ ID NO: 232
  Synthetic

SEQ ID NO: 474 - protein, 719 aa, Artificial Sequence
  Synthetic
QVQLVQSGAEVKKPGASVKVSCKASGYTFTSYVMHWVRQKPGQGLEWIGYINPYNEGTESTDKFKGRATMTSDKSTSTVYMELSSLRSEDTAVYYCASIYYGYEGTYFGVWGQGTLVTVSSASTKGPSVFPLAPSSKSTSGGTAALGCLVKDYFPEPVTVSWNSGALTSGVHTFPAVLQSSGLYSLSSVVTVPSSSLGTQTYICNVNHKPSNTKVDKKVEPKSCDKTHTCPPCPAPEAAGPSVFLFPPKPKDTLMISRTPEVTCVVVDVSHEDPEVKFNWYVDGVEVHNAKTKPREEQYNSTYRVVSVLTVLHQDWLNGKEYKCKVSNKALPAPIEKTISKAKGQPREPQVYTLPPSREEMTKNQVSLWCLVKGFYPSDIAVEWESNGQPENNYKTTPPVLDSDGSFFLYSKLTVDKSRWQQGNVFSCSVMHEALHNHYTQKSLSLSPGGGGGSGGGGSGGGGSGGGGSQVQLQESGPGLVKPSETLSLTCTVSGGSISSYYWSWIRQPPGKGLEWIGYIYYSGITHYNPSLKSRVTISVDTSKIQFSLKLSSVTAADTAVYYCARWGVRRDYYYYGMDVWGQGTTVTVSSGGGGSGGGGSGGGGSGGGGSEIVLTQSPGTLSLSPGERATLSCRASQSVSSSYLAWYQQKPGQAPRLLIYGASSRATGIPDRFSGSGSGTDFTLTISRLEPEDFAVYYCQQYGSSPWTFGQGTKVEIK

SEQ ID NO: 475 - protein, 971 aa, Artificial Sequence
  Synthetic
QVQLVQSGAEVKKPGASVKVSCKASGYTFTSYVMHWVRQKPGQGLEWIGYINPYNEGTESTDKFKGRATMTSDKSTSTVYMELSSLRSEDTAVYYCASIYYGYEGTYFGVWGQGTLVTVSSASTKGPSVFPLAPSSKSTSGGTAALGCLVKDYFPEPVTVSWNSGALTSGVHTFPAVLQSSGLYSLSSVVTVPSSSLGTQTYICNVNHKPSNTKVDKKVEPKSCGGGGSGGGGSGGGGSGGGGSEVQLVESGGGLVQPGGSLRLSCAASGFTFSTYAMNWVRQAPGKGLEWVGRIRSKYNNYATYYADSVKGRFTISRDDSKNSLYLQMNSLKTEDTAVYYCVRHGNFGNSYVSWFAYWGQGTLVTVSSASVAAPSVFIFPPSDEQLKSGTASVVCLLNNFYPREAKVQWKVDNALQSGNSQESVTEQDSKDSTYSLSSTLTLSKADYEKHKVYACEVTHQGLSSPVTKSFNRGECDKTHTCPPCPAPEAAGPSVFLFPPKPKDTLMISRTPEVTCVVVDVSHEDPEVKFNWYVDGVEVHNAKTKPREEQYNSTYRVVSVLTVLHQDWLNGKEYKCKVSNKALPAPIEKTISKAKGQPREPQVYTLPPSREEMTKNQVSLSCAVKGFYPSDIAVEWESNGQPENNYKTTPPVLDSDGSFFLVSKLTVDKSRWQQGNVFSCSVMHEALHNRFTQKSLSLSPGGGGGSGGGGSGGGGSGGGGSQVQLQESGPGLVKPSETLSLTCTVSGGSISSYYWSWIRQPPGKGLEWIGYIYYSGITHYNPSLKSRVTISVDTSKIQFSLKLSSVTAADTAVYYCARWGVRRDYYYYGMDVWGQGTTVTVSSGGGGSGGGGSGGGGSGGGGSEIVLTQSPGTLSLSPGERATLSCRASQSVSSSYLAWYQQKPGQAPRLLIYGASSRATGIPDRFSGSGSGTDFTLTISRLEPEDFAVYYCQQYGSSPWTFGQGTKVEIK

SEQ ID NO: 476 - protein, 213 aa, Artificial Sequence; identical to SEQ ID NO: 42
  Synthetic

SEQ ID NO: 477 - protein, 214 aa, Artificial Sequence; identical to SEQ ID NO: 232
  Synthetic

SEQ ID NO: 478 - protein, 450 aa, Artificial Sequence; identical to SEQ ID NO: 229
  Synthetic

SEQ ID NO: 479 - protein, 971 aa, Artificial Sequence; identical to SEQ ID NO: 471
  Synthetic

SEQ ID NO: 480 - protein, 213 aa, Artificial Sequence; identical to SEQ ID NO: 42
  Synthetic

SEQ ID NO: 481 - protein, 214 aa, Artificial Sequence; identical to SEQ ID NO: 232
  Synthetic

SEQ ID NO: 482 - protein, 450 aa, Artificial Sequence; identical to SEQ ID NO: 229
  Synthetic

SEQ ID NO: 483 - protein, 971 aa, Artificial Sequence; identical to SEQ ID NO: 475
  Synthetic

SEQ ID NO: 484 - protein, 213 aa, Artificial Sequence; identical to SEQ ID NO: 42
  Synthetic

SEQ ID NO: 485 - protein, 214 aa, Artificial Sequence; identical to SEQ ID NO: 232
  Synthetic

SEQ ID NO: 486 - protein, 719 aa, Artificial Sequence; identical to SEQ ID NO: 470
  Synthetic

SEQ ID NO: 487 - protein, 702 aa, Artificial Sequence; identical to SEQ ID NO: 230
  Synthetic

SEQ ID NO: 488 - protein, 213 aa, Artificial Sequence; identical to SEQ ID NO: 42
  Synthetic

SEQ ID NO: 489 - protein, 214 aa, Artificial Sequence; identical to SEQ ID NO: 232
  Synthetic

SEQ ID NO: 490 - protein, 719 aa, Artificial Sequence; identical to SEQ ID NO: 474
  Synthetic

SEQ ID NO: 491 - protein, 702 aa, Artificial Sequence; identical to SEQ ID NO: 230
  Synthetic

SEQ ID NO: 492 - protein, 213 aa, Artificial Sequence; identical to SEQ ID NO: 42
  Synthetic

SEQ ID NO: 493 - protein, 214 aa, Artificial Sequence; identical to SEQ ID NO: 232
  Synthetic

SEQ ID NO: 494 - protein, 591 aa, Artificial Sequence
  Synthetic
QVQLVQSGAEVKKPGASVKVSCKASGYTFTSYVMHWVRQKPGQGLEWIGYINPYNEGTESTDKFKGRATMTSDKSTSTVYMELSSLRSEDTAVYYCASIYYGYEGTYFGVWGQGTLVTVSSASTKGPSVFPLAPSSKSTSGGTAALGCLVKDYFPEPVTVSWNSGALTSGVHTFPAVLQSSGLYSLSSVVTVPSSSLGTQTYICNVNHKPSNTKVDKKVEPKSCDKTHTCPPCPAPEAAGPSVFLFPPKPKDTLMISRTPEVTCVVVDVSHEDPEVKFNWYVDGVEVHNAKTKPREEQYNSTYRVVSVLTVLHQDWLNGKEYKCKVSNKALPAPIEKTISKAKGQPREPQVYTLPPSREEMTKNQVSLWCLVKGFYPSDIAVEWESNGQPENNYKTTPPVLDSDGSFFLYSKLTVDKSRWQQGNVFSCSVMHEALHNHYTQKSLSLSPGGGGGSGGGGSGGGGSGGGGSQVQLQESGPGLVKPSETLSLTCTVSGGSISSYYWSWIRQPPGKGLEWIGYIYYSGITHYNPSLKSRVTISVDTSKIQFSLKLSSVTAADTAVYYCARWGVRRDYYYYGMDVWGQGTTVTVSS

SEQ ID NO: 495 - protein, 829 aa, Artificial Sequence
  Synthetic
QVQLVQSGAEVKKPGASVKVSCKASGYTFTSYVMHWVRQKPGQGLEWIGYINPYNEGTESTDKFKGRATMTSDKSTSTVYMELSSLRSEDTAVYYCASIYYGYEGTYFGVWGQGTLVTVSSASTKGPSVFPLAPSSKSTSGGTAALGCLVKDYFPEPVTVSWNSGALTSGVHTFPAVLQSSGLYSLSSVVTVPSSSLGTQTYICNVNHKPSNTKVDKKVEPKSCGGGGSGGGGSGGGGSGGGGSEVQLVESGGGLVQPGGSLRLSCAASGFTFSTYAMNWVRQAPGKGLEWVGRIRSKYNNYATYYADSVKGRFTISRDDSKNSLYLQMNSLKTEDTAVYYCVRHGNFGNSYVSWFAYWGQGTLVTVSSASVAAPSVFIFPPSDEQLKSGTASVVCLLNNFYPREAKVQWKVDNALQSGNSQESVTEQDSKDSTYSLSSTLTLSKADYEKHKVYACEVTHQGLSSPVTKSFNRGECDKTHTCPPCPAPEAAGPSVFLFPPKPKDTLMISRTPEVTCVVVDVSHEDPEVKFNWYVDGVEVHNAKTKPREEQYNSTYRVVSVLTVLHQDWLNGKEYKCKVSNKALPAPIEKTISKAKGQPREPQVYTLPPSREEMTKNQVSLSCAVKGFYPSDIAVEWESNGQPENNYKTTPPVLDSDGSFFLVSKLTVDKSRWQQGNVFSCSVMHEALHNRFTQKSLSLSPGGGGGSGGGGSGGGGSGGGGSEIVLTQSPGTLSLSPGERATLSCRASQSVSSSYLAWYQQKPGQAPRLLIYGASSRATGIPDRFSGSGSGTDFTLTISRLEPEDFAVYYCQQYGSSPWTFGQGTKVEIK

SEQ ID NO: 496 - protein, 213 aa, Artificial Sequence; identical to SEQ ID NO: 42
  Synthetic

SEQ ID NO: 497 - protein, 214 aa, Artificial Sequence; identical to SEQ ID NO: 232
  Synthetic

SEQ ID NO: 498 - protein, 719 aa, Artificial Sequence; identical to SEQ ID NO: 470
  Synthetic

SEQ ID NO: 499 - protein, 724 aa, Artificial Sequence; identical to SEQ ID NO: 234
  Synthetic

SEQ ID NO: 500 - protein, 213 aa, Artificial Sequence; identical to SEQ ID NO: 42
  Synthetic

SEQ ID NO: 501 - protein, 719 aa, Artificial Sequence; identical to SEQ ID NO: 474
  Synthetic

SEQ ID NO: 502 - protein, 724 aa, Artificial Sequence; identical to SEQ ID NO: 234
  Synthetic

SEQ ID NO: 503 - protein, 213 aa, Artificial Sequence; identical to SEQ ID NO: 42
  Synthetic

SEQ ID NO: 504 - protein, 719 aa, Artificial Sequence; identical to SEQ ID NO: 470
  Synthetic

SEQ ID NO: 505 - protein, 993 aa, Artificial Sequence
  Synthetic
QVQLVQSGAEVKKPGASVKVSCKASGYTFTSYVMHWVRQKPGQGLEWIGYINPYNEGTESTDKFKGRATMTSDKSTSTVYMELSSLRSEDTAVYYCASIYYGYEGTYFGVWGQGTLVTVSSASTKGPSVFPLAPSSKSTSGGTAALGCLVKDYFPEPVTVSWNSGALTSGVHTFPAVLQSSGLYSLSSVVTVPSSSLGTQTYICNVNHKPSNTKVDKKVEPKSCGGGGSGGGGSGGGGSGGGGSQAVVTQEPSLTVSPGGTVTLTCRSSTGAVTTSNYANWVQQKPGQAPRGLIGGTNKRAPWTPARFSGSLLGGKAALTITGAQAEDEADYYCALWYSNLWVFGGGTKLTVLGGGGSGGGGSGGGGSGGGGSEVQLVESGGGLVQPGGSLRLSCAASGFTFSTYAMNWVRQAPGKGLEWVGRIRSKYNNYATYYADSVKGRFTISRDDSKNSLYLQMNSLKTEDTAVYYCVRHGNFGNSYVSWFAYWGQGTLVTVSSDKTHTCPPCPAPEAAGPSVFLFPPKPKDTLMISRTPEVTCVVVDVSHEDPEVKFNWYVDGVEVHNAKTKPREEQYNSTYRVVSVLTVLHQDWLNGKEYKCKVSNKALPAPIEKTISKAKGQPREPQVYTLPPSREEMTKNQVSLSCAVKGFYPSDIAVEWESNGQPENNYKTTPPVLDSDGSFFLVSKLTVDKSRWQQGNVFSCSVMHEALHNRFTQKSLSLSPGGGGGSGGGGSGGGGSGGGGSEIVLTQSPGTLSLSPGERATLSCRASQSVSSSYLAWYQQKPGQAPRLLIYGASSRATGIPDRFSGSGSGTDFTLTISRLEPEDFAVYYCQQYGSSPWTFGQGTKVEIKGGGGSGGGGSGGGGSGGGGSQVQLQESGPGLVKPSETLSLTCTVSGGSISSYYWSWIRQPPGKGLEWIGYIYYSGITHYNPSLKSRVTISVDTSKIQFSLKLSSVTAADTAVYYCARWGVRRDYYYYGMDVWGQGTTVTVSS

SEQ ID NO: 506 - protein, 213 aa, Artificial Sequence; identical to SEQ ID NO: 42
  Synthetic

SEQ ID NO: 507 - protein, 719 aa, Artificial Sequence; identical to SEQ ID NO: 474
  Synthetic

SEQ ID NO: 508 - protein, 993 aa, Artificial Sequence
  Synthetic
QVQLVQSGAEVKKPGASVKVSCKASGYTFTSYVMHWVRQKPGQGLEWIGYINPYNEGTESTDKFKGRATMTSDKSTSTVYMELSSLRSEDTAVYYCASIYYGYEGTYFGVWGQGTLVTVSSASTKGPSVFPLAPSSKSTSGGTAALGCLVKDYFPEPVTVSWNSGALTSGVHTFPAVLQSSGLYSLSSVVTVPSSSLGTQTYICNVNHKPSNTKVDKKVEPKSCGGGGSGGGGSGGGGSGGGGSQAVVTQEPSLTVSPGGTVTLTCRSSTGAVTTSNYANWVQQKPGQAPRGLIGGTNKRAPWTPARFSGSLLGGKAALTITGAQAEDEADYYCALWYSNLWVFGGGTKLTVLGGGGSGGGGSGGGGSGGGGSEVQLVESGGGLVQPGGSLRLSCAASGFTFSTYAMNWVRQAPGKGLEWVGRIRSKYNNYATYYADSVKGRFTISRDDSKNSLYLQMNSLKTEDTAVYYCVRHGNFGNSYVSWFAYWGQGTLVTVSSDKTHTCPPCPAPEAAGPSVFLFPPKPKDTLMISRTPEVTCVVVDVSHEDPEVKFNWYVDGVEVHNAKTKPREEQYNSTYRVVSVLTVLHQDWLNGKEYKCKVSNKALPAPIEKTISKAKGQPREPQVYTLPPSREEMTKNQVSLSCAVKGFYPSDIAVEWESNGQPENNYKTTPPVLDSDGSFFLVSKLTVDKSRWQQGNVFSCSVMHEALHNRFTQKSLSLSPGGGGGSGGGGSGGGGSGGGGSQVQLQESGPGLVKPSETLSLTCTVSGGSISSYYWSWIRQPPGKGLEWIGYIYYSGITHYNPSLKSRVTISVDTSKIQFSLKLSSVTAADTAVYYCARWGVRRDYYYYGMDVWGQGTTVTVSSGGGGSGGGGSGGGGSGGGGSEIVLTQSPGTLSLSPGERATLSCRASQSVSSSYLAWYQQKPGQAPRLLIYGASSRATGIPDRFSGSGSGTDFTLTISRLEPEDFAVYYCQQYGSSPWTFGQGTKVEIK

SEQ ID NO: 509 - protein, 213 aa, Artificial Sequence; identical to SEQ ID NO: 42
  Synthetic

SEQ ID NO: 510 - protein, 450 aa, Artificial Sequence; identical to SEQ ID NO: 229
  Synthetic

SEQ ID NO: 511 - protein, 993 aa, Artificial Sequence; identical to SEQ ID NO: 505
  Synthetic

SEQ ID NO: 512 - protein, 213 aa, Artificial Sequence; identical to SEQ ID NO: 42
  Synthetic

SEQ ID NO: 513 - protein, 450 aa, Artificial Sequence; identical to SEQ ID NO: 229
  Synthetic

SEQ ID NO: 514 - protein, 993 aa, Artificial Sequence; identical to SEQ ID NO: 508
  Synthetic

SEQ ID NO: 515 - protein, 213 aa, Artificial Sequence; identical to SEQ ID NO: 42
  Synthetic

SEQ ID NO: 516 - protein, 855 aa, Artificial Sequence
  Synthetic
QVQLVQSGAEVKKPGASVKVSCKASGYTFTSYVMHWVRQKPGQGLEWIGYINPYNEGTESTDKFKGRATMTSDKSTSTVYMELSSLRSEDTAVYYCASIYYGYEGTYFGVWGQGTLVTVSSASTKGPSVFPLAPSSKSTSGGTAALGCLVKDYFPEPVTVSWNSGALTSGVHTFPAVLQSSGLYSLSSVVTVPSSSLGTQTYICNVNHKPSNTKVDKKVEPKSCGGGGSGGGGSGGGGSGGGGSEVQLVESGGGLVQPGGSLRLSCAASGFTFSTYAMNWVRQAPGKGLEWVGRIRSKYNNYATYYADSVKGRFTISRDDSKNSLYLQMNSLKTEDTAVYYCVRHGNFGNSYVSWFAYWGQGTLVTVSSPAPEAAGPSVFLFPPKPKDTLMISRTPEVTCVVVDVSHEDPEVKFNWYVDGVEVHNAKTKPREEQYNSTYRVVSVLTVLHQDWLNGKEYKCKVSNKALPAPIEKTISKAKGQPREPQVYTLPPSREEMTKNQVSLWCLVKGFYPSDIAVEWESNGQPENNYKTTPPVLDSDGSFFLYSKLTVDKSRWQQGNVFSCSVMHEALHNHYTQKSLSLSPGGGGGSGGGGSGGGGSGGGGSEIVLTQSPGTLSLSPGERATLSCRASQSVSSSYLAWYQQKPGQAPRLLIYGASSRATGIPDRFSGSGSGTDFTLTISRLEPEDFAVYYCQQYGSSPWTFGQGTKVEIKGGGGSGGGGSGGGGSGGGGSQVQLQESGPGLVKPSETLSLTCTVSGGSISSYYWSWIRQPPGKGLEWIGYIYYSGITHYNPSLKSRVTISVDTSKIQFSLKLSSVTAADTAVYYCARWGVRRDYYYYGMDVWGQGTTVTVSS

SEQ ID NO: 517 - protein, 839 aa, Artificial Sequence
  Synthetic
QVQLVQSGAEVKKPGASVKVSCKASGYTFTSYVMHWVRQKPGQGLEWIGYINPYNEGTESTDKFKGRATMTSDKSTSTVYMELSSLRSEDTAVYYCASIYYGYEGTYFGVWGQGTLVTVSSASTKGPSVFPLAPSSKSTSGGTAALGCLVKDYFPEPVTVSWNSGALTSGVHTFPAVLQSSGLYSLSSVVTVPSSSLGTQTYICNVNHKPSNTKVDKKVEPKSCGGGGSGGGGSGGGGSGGGGSQAVVTQEPSLTVSPGGTVTLTCRSSTGAVTTSNYANWVQQKPGQAPRGLIGGTNKRAPWTPARFSGSLLGGKAALTITGAQAEDEADYYCALWYSNLWVFGGGTKLTVLPAPEAAGPSVFLFPPKPKDTLMISRTPEVTCVVVDVSHEDPEVKFNWYVDGVEVHNAKTKPREEQYNSTYRVVSVLTVLHQDWLNGKEYKCKVSNKALPAPIEKTISKAKGQPREPQVYTLPPSREEMTKNQVSLSCAVKGFYPSDIAVEWESNGQPENNYKTTPPVLDSDGSFFLVSKLTVDKSRWQQGNVFSCSVMHEALHNRFTQKSLSLSPGGGGGSGGGGSGGGGSGGGGSEIVLTQSPGTLSLSPGERATLSCRASQSVSSSYLAWYQQKPGQAPRLLIYGASSRATGIPDRFSGSGSGTDFTLTISRLEPEDFAVYYCQQYGSSPWTFGQGTKVEIKGGGGSGGGGSGGGGSGGGGSQVQLQESGPGLVKPSETLSLTCTVSGGSISSYYWSWIRQPPGKGLEWIGYIYYSGITHYNPSLKSRVTISVDTSKIQFSLKLSSVTAADTAVYYCARWGVRRDYYYYGMDVWGQGTTVTVSS

SEQ ID NO: 518 - protein, 213 aa, Artificial Sequence; identical to SEQ ID NO: 42
  Synthetic

SEQ ID NO: 519 - protein, 855 aa, Artificial Sequence
  Synthetic
QVQLVQSGAEVKKPGASVKVSCKASGYTFTSYVMHWVRQKPGQGLEWIGYINPYNEGTESTDKFKGRATMTSDKSTSTVYMELSSLRSEDTAVYYCASIYYGYEGTYFGVWGQGTLVTVSSASTKGPSVFPLAPSSKSTSGGTAALGCLVKDYFPEPVTVSWNSGALTSGVHTFPAVLQSSGLYSLSSVVTVPSSSLGTQTYICNVNHKPSNTKVDKKVEPKSCGGGGSGGGGSGGGGSGGGGSEVQLVESGGGLVQPGGSLRLSCAASGFTFSTYAMNWVRQAPGKGLEWVGRIRSKYNNYATYYADSVKGRFTISRDDSKNSLYLQMNSLKTEDTAVYYCVRHGNFGNSYVSWFAYWGQGTLVTVSSPAPEAAGPSVFLFPPKPKDTLMISRTPEVTCVVVDVSHEDPEVKFNWYVDGVEVHNAKTKPREEQYNSTYRVVSVLTVLHQDWLNGKEYKCKVSNKALPAPIEKTISKAKGQPREPQVYTLPPSREEMTKNQVSLWCLVKGFYPSDIAVEWESNGQPENNYKTTPPVLDSDGSFFLYSKLTVDKSRWQQGNVFSCSVMHEALHNHYTQKSLSLSPGGGGGSGGGGSGGGGSGGGGSQVQLQESGPGLVKPSETLSLTCTVSGGSISSYYWSWIRQPPGKGLEWIGYIYYSGITHYNPSLKSRVTISVDTSKIQFSLKLSSVTAADTAVYYCARWGVRRDYYYYGMDVWGQGTTVTVSSGGGGSGGGGSGGGGSGGGGSEIVLTQSPGTLSLSPGERATLSCRASQSVSSSYLAWYQQKPGQAPRLLIYGASSRATGIPDRFSGSGSGTDFTLTISRLEPEDFAVYYCQQYGSSPWTFGQGTKVEIK

SEQ ID NO: 520 - protein, 839 aa, Artificial Sequence
  Synthetic
QVQLVQSGAEVKKPGASVKVSCKASGYTFTSYVMHWVRQKPGQGLEWIGYINPYNEGTESTDKFKGRATMTSDKSTSTVYMELSSLRSEDTAVYYCASIYYGYEGTYFGVWGQGTLVTVSSASTKGPSVFPLAPSSKSTSGGTAALGCLVKDYFPEPVTVSWNSGALTSGVHTFPAVLQSSGLYSLSSVVTVPSSSLGTQTYICNVNHKPSNTKVDKKVEPKSCGGGGSGGGGSGGGGSGGGGSQAVVTQEPSLTVSPGGTVTLTCRSSTGAVTTSNYANWVQQKPGQAPRGLIGGTNKRAPWTPARFSGSLLGGKAALTITGAQAEDEADYYCALWYSNLWVFGGGTKLTVLPAPEAAGPSVFLFPPKPKDTLMISRTPEVTCVVVDVSHEDPEVKFNWYVDGVEVHNAKTKPREEQYNSTYRVVSVLTVLHQDWLNGKEYKCKVSNKALPAPIEKTISKAKGQPREPQVYTLPPSREEMTKNQVSLSCAVKGFYPSDIAVEWESNGQPENNYKTTPPVLDSDGSFFLVSKLTVDKSRWQQGNVFSCSVMHEALHNRFTQKSLSLSPGGGGGSGGGGSGGGGSGGGGSQVQLQESGPGLVKPSETLSLTCTVSGGSISSYYWSWIRQPPGKGLEWIGYIYYSGITHYNPSLKSRVTISVDTSKIQFSLKLSSVTAADTAVYYCARWGVRRDYYYYGMDVWGQGTTVTVSSGGGGSGGGGSGGGGSGGGGSEIVLTQSPGTLSLSPGERATLSCRASQSVSSSYLAWYQQKPGQAPRLLIYGASSRATGIPDRFSGSGSGTDFTLTISRLEPEDFAVYYCQQYGSSPWTFGQGTKVEIK

SEQ ID NO: 521 - protein, 213 aa, Artificial Sequence; identical to SEQ ID NO: 42
  Synthetic

SEQ ID NO: 522 - protein, 855 aa, Artificial Sequence; identical to SEQ ID NO: 516
  Synthetic

SEQ ID NO: 523 - protein, 570 aa, Artificial Sequence; identical to SEQ ID NO: 237
  Synthetic

SEQ ID NO: 524 - protein, 213 aa, Artificial Sequence; identical to SEQ ID NO: 42
  Synthetic

SEQ ID NO: 525 - protein, 855 aa, Artificial Sequence; identical to SEQ ID NO: 519
  Synthetic

SEQ ID NO: 526 - protein, 570 aa, Artificial Sequence; identical to SEQ ID NO: 237
  Synthetic

SEQ ID NO: 527 - protein, 213 aa, Artificial Sequence; identical to SEQ ID NO: 42
  Synthetic

SEQ ID NO: 528 - protein, 586 aa, Artificial Sequence; identical to SEQ ID NO: 236
  Synthetic

SEQ ID NO: 529 - protein, 839 aa, Artificial Sequence; identical to SEQ ID NO: 517
  Synthetic

SEQ ID NO: 530 - protein, 213 aa, Artificial Sequence; identical to SEQ ID NO: 42
  Synthetic

SEQ ID NO: 531 - protein, 586 aa, Artificial Sequence; identical to SEQ ID NO: 236
  Synthetic

SEQ ID NO: 532 - protein, 839 aa, Artificial Sequence; identical to SEQ ID NO: 520
  Synthetic

SEQ ID NO: 533 - protein, 213 aa, Artificial Sequence; identical to SEQ ID NO: 42
  Synthetic

SEQ ID NO: 534 - protein, 727 aa, Artificial Sequence
  Synthetic
QVQLVQSGAEVKKPGASVKVSCKASGYTFTSYVMHWVRQKPGQGLEWIGYINPYNEGTESTDKFKGRATMTSDKSTSTVYMELSSLRSEDTAVYYCASIYYGYEGTYFGVWGQGTLVTVSSASTKGPSVFPLAPSSKSTSGGTAALGCLVKDYFPEPVTVSWNSGALTSGVHTFPAVLQSSGLYSLSSVVTVPSSSLGTQTYICNVNHKPSNTKVDKKVEPKSCGGGGSGGGGSGGGGSGGGGSEVQLVESGGGLVQPGGSLRLSCAASGFTFSTYAMNWVRQAPGKGLEWVGRIRSKYNNYATYYADSVKGRFTISRDDSKNSLYLQMNSLKTEDTAVYYCVRHGNFGNSYVSWFAYWGQGTLVTVSSPAPEAAGPSVFLFPPKPKDTLMISRTPEVTCVVVDVSHEDPEVKFNWYVDGVEVHNAKTKPREEQYNSTYRVVSVLTVLHQDWLNGKEYKCKVSNKALPAPIEKTISKAKGQPREPQVYTLPPSREEMTKNQVSLWCLVKGFYPSDIAVEWESNGQPENNYKTTPPVLDSDGSFFLYSKLTVDKSRWQQGNVFSCSVMHEALHNHYTQKSLSLSPGGGGGSGGGGSGGGGSGGGGSQVQLQESGPGLVKPSETLSLTCTVSGGSISSYYWSWIRQPPGKGLEWIGYIYYSGITHYNPSLKSRVTISVDTSKIQFSLKLSSVTAADTAVYYCARWGVRRDYYYYGMDVWGQGTTVTVSS

SEQ ID NO: 535 - protein, 697 aa, Artificial Sequence
  Synthetic
QVQLVQSGAEVKKPGASVKVSCKASGYTFTSYVMHWVRQKPGQGLEWIGYINPYNEGTESTDKFKGRATMTSDKSTSTVYMELSSLRSEDTAVYYCASIYYGYEGTYFGVWGQGTLVTVSSASTKGPSVFPLAPSSKSTSGGTAALGCLVKDYFPEPVTVSWNSGALTSGVHTFPAVLQSSGLYSLSSVVTVPSSSLGTQTYICNVNHKPSNTKVDKKVEPKSCGGGGSGGGGSGGGGSGGGGSQAVVTQEPSLTVSPGGTVTLTCRSSTGAVTTSNYANWVQQKPGQAPRGLIGGTNKRAPWTPARFSGSLLGGKAALTITGAQAEDEADYYCALWYSNLWVFGGGTKLTVLPAPEAAGPSVFLFPPKPKDTLMISRTPEVTCVVVDVSHEDPEVKFNWYVDGVEVHNAKTKPREEQYNSTYRVVSVLTVLHQDWLNGKEYKCKVSNKALPAPIEKTISKAKGQPREPQVYTLPPSREEMTKNQVSLSCAVKGFYPSDIAVEWESNGQPENNYKTTPPVLDSDGSFFLVSKLTVDKSRWQQGNVFSCSVMHEALHNRFTQKSLSLSPGGGGGSGGGGSGGGGSGGGGSEIVLTQSPGTLSLSPGERATLSCRASQSVSSSYLAWYQQKPGQAPRLLIYGASSRATGIPDRFSGSGSGTDFTLTISRLEPEDFAVYYCQQYGSSPWTFGQGTKVEIK

SEQ ID NO: 536 - protein, 213 aa, Artificial Sequence; identical to SEQ ID NO: 42
  Synthetic

SEQ ID NO: 537 - protein, 586 aa, Artificial Sequence; identical to SEQ ID NO: 236
  Synthetic

SEQ ID NO: 538 - protein, 570 aa, Artificial Sequence; identical to SEQ ID NO: 237
  Synthetic

SEQ ID NO: 539 - protein, 483 aa, Artificial Sequence
  Synthetic
EIVLTQSPATLSLSPGERATLSCRASSSVSYMHWYQQKPGQAPRPWIYATSNLASGIPARFSGSRSGTDYTLTISSLEPEDFAVYYCQQWSSNTLTFGGGTKVEIKRTVAAPSVFIFPPSDEQLKSGTASVVCLLNNFYPREAKVQWKVDNALQSGNSQESVTEQDSKDSTYSLSSTLTLSKADYEKHKVYACEVTHQGLSSPVTKSFNRGECGGGGSGGGGSGGGGSGGGGSEIVLTQSPGTLSLSPGERATLSCRASQSVSSSYLAWYQQKPGQAPRLLIYGASSRATGIPDRFSGSGSGTDFTLTISRLEPEDFAVYYCQQYGSSPWTFGQGTKVEIKGGGGSGGGGSGGGGSGGGGSQVQLQESGPGLVKPSETLSLTCTVSGGSISSYYWSWIRQPPGKGLEWIGYIYYSGITHYNPSLKSRVTISVDTSKIQFSLKLSSVTAADTAVYYCARWGVRRDYYYYGMDVWGQGTTVTVSS

SEQ ID NO: 540 - protein, 586 aa, Artificial Sequence; identical to SEQ ID NO: 236
  Synthetic

SEQ ID NO: 541 - protein, 570 aa, Artificial Sequence; identical to SEQ ID NO: 237
  Synthetic

SEQ ID NO: 542 - protein, 483 aa, Artificial Sequence
  Synthetic
EIVLTQSPATLSLSPGERATLSCRASSSVSYMHWYQQKPGQAPRPWIYATSNLASGIPARFSGSRSGTDYTLTISSLEPEDFAVYYCQQWSSNTLTFGGGTKVEIKRTVAAPSVFIFPPSDEQLKSGTASVVCLLNNFYPREAKVQWKVDNALQSGNSQESVTEQDSKDSTYSLSSTLTLSKADYEKHKVYACEVTHQGLSSPVTKSFNRGECGGGGSGGGGSGGGGSGGGGSQVQLQESGPGLVKPSETLSLTCTVSGGSISSYYWSWIRQPPGKGLEWIGYIYYSGITHYNPSLKSRVTISVDTSKIQFSLKLSSVTAADTAVYYCARWGVRRDYYYYGMDVWGQGTTVTVSSGGGGSGGGGSGGGGSGGGGSEIVLTQSPGTLSLSPGERATLSCRASQSVSSSYLAWYQQKPGQAPRLLIYGASSRATGIPDRFSGSGSGTDFTLTISRLEPEDFAVYYCQQYGSSPWTFGQGTKVEIK

SEQ ID NO: 543 - protein, 719 aa, Artificial Sequence; identical to SEQ ID NO: 470
  Synthetic

SEQ ID NO: 544 - protein, 714 aa, Artificial Sequence; identical to SEQ ID NO: 243
  Synthetic

SEQ ID NO: 545 - protein, 213 aa, Artificial Sequence; identical to SEQ ID NO: 42
  Synthetic

SEQ ID NO: 546 - protein, 719 aa, Artificial Sequence; identical to SEQ ID NO: 474
  Synthetic

SEQ ID NO: 547 - protein, 714 aa, Artificial Sequence; identical to SEQ ID NO: 243
  Synthetic

SEQ ID NO: 548 - protein, 213 aa, Artificial Sequence; identical to SEQ ID NO: 42
  Synthetic

SEQ ID NO: 549 - protein, 586 aa, Artificial Sequence; identical to SEQ ID NO: 245
  Synthetic

SEQ ID NO: 550 - protein, 570 aa, Artificial Sequence
  Synthetic
EVQLVQSGAEVKKPGASVKVSCKASGYTFTDSYMSWVRQAPGQGLEWIGDMYPDNGDSSYNQKFRERVTITRDTSTSTAYLELSSLRSEDTAVYYCVLAPRWYFSVWGQGTLVTVSSASVAAPSVFIFPPSDEQLKSGTASVVCLLNNFYPREAKVQWKVDNALQSGNSQESVTEQDSKDSTYSLSSTLTLSKADYEKHKVYACEVTHQGLSSPVTKSFNRGECGGGGSGGGGSGGGGSGGGGSQAVVTQEPSLTVSPGGTVTLTCRSSTGAVTTSNYANWVQQKPGQAPRGLIGGTNKRAPWTPARFSGSLLGGKAALTITGAQAEDEADYYCALWYSNLWVFGGGTKLTVLPAPELLGPSVFLFPPKPKDTLMISRTPEVTCVVVDVSHEDPEVKFNWYVDGVEVHNAKTKPREEQYNSTYRVVSVLTVLHQDWLNGKEYKCKVSNKALPAPIEKTISKAKGQPREPQVYTLPPSREEMTKNQVSLSCAVKGFYPSDIAVEWESNGQPENNYKTTPPVLDSDGSFFLVSKLTVDKSRWQQGNVFSCSVMHEALHNRFTQKSLSLSPGK

SEQ ID NO: 551 - protein, 213 aa, Artificial Sequence; identical to SEQ ID NO: 42
  Synthetic

SEQ ID NO: 552 - protein, 212 aa, Artificial Sequence; identical to SEQ ID NO: 148
  Synthetic

SEQ ID NO: 553 - protein, 713 aa, Artificial Sequence
  Synthetic
QVQLVQSGAEVKKPGASVKVSCKASGYTFTSYVMHWVRQKPGQGLEWIGYINPYNEGTESTDKFKGRATMTSDKSTSTVYMELSSLRSEDTAVYYCASIYYGYEGTYFGVWGQGTLVTVSSASTKGPSVFPLAPSSKSTSGGTAALGCLVKDYFPEPVTVSWNSGALTSGVHTFPAVLQSSGLYSLSSVVTVPSSSLGTQTYICNVNHKPSNTKVDKKVEPKSCDKTHTCPPCPAPEAAGPSVFLFPPKPKDTLMISRTPEVTCVVVDVSHEDPEVKFNWYVDGVEVHNAKTKPREEQYNSTYRVVSVLTVLHQDWLNGKEYKCKVSNKALPAPIEKTISKAKGQPREPQVYTLPPSREEMTKNQVSLWCLVKGFYPSDIAVEWESNGQPENNYKTTPPVLDSDGSFFLYSKLTVDKSRWQQGNVFSCSVMHEALHNHYTQKSLSLSPGGGGGSGGGGSGGGGSGGGGSDIQMTQSPSSLSASVGDRVTITCRASQDISNYLNWYQQKPGKAPKLLIYYTSRLRSGVPSRFSGSGSGTDFTLTISSLQPEDFATYYCQQGHTLPPTFGQGTKVEIKGGGGSGGGGSGGGGSGGGGSEVQLVQSGAEVKKPGASVKVSCKASGYTFTDSYMSWVRQAPGQGLEWIGDMYPDNGDSSYNQKFRERVTITRDTSTSTAYLELSSLRSEDTAVYYCVLAPRWYFSVWGQGTLVTVSS

SEQ ID NO: 554 - protein, 965 aa, Artificial Sequence
  Synthetic
QVQLVQSGAEVKKPGASVKVSCKASGYTFTSYVMHWVRQKPGQGLEWIGYINPYNEGTESTDKFKGRATMTSDKSTSTVYMELSSLRSEDTAVYYCASIYYGYEGTYFGVWGQGTLVTVSSASTKGPSVFPLAPSSKSTSGGTAALGCLVKDYFPEPVTVSWNSGALTSGVHTFPAVLQSSGLYSLSSVVTVPSSSLGTQTYICNVNHKPSNTKVDKKVEPKSCGGGGSGGGGSGGGGSGGGGSEVQLVESGGGLVQPGGSLRLSCAASGFTFSTYAMNWVRQAPGKGLEWVGRIRSKYNNYATYYADSVKGRFTISRDDSKNSLYLQMNSLKTEDTAVYYCVRHGNFGNSYVSWFAYWGQGTLVTVSSASVAAPSVFIFPPSDEQLKSGTASVVCLLNNFYPREAKVQWKVDNALQSGNSQESVTEQDSKDSTYSLSSTLTLSKADYEKHKVYACEVTHQGLSSPVTKSFNRGECDKTHTCPPCPAPEAAGPSVFLFPPKPKDTLMISRTPEVTCVVVDVSHEDPEVKFNWYVDGVEVHNAKTKPREEQYNSTYRVVSVLTVLHQDWLNGKEYKCKVSNKALPAPIEKTISKAKGQPREPQVYTLPPSREEMTKNQVSLSCAVKGFYPSDIAVEWESNGQPENNYKTTPPVLDSDGSFFLVSKLTVDKSRWQQGNVFSCSVMHEALHNRFTQKSLSLSPGGGGGSGGGGSGGGGSGGGGSDIQMTQSPSSLSASVGDRVTITCRASQDISNYLNWYQQKPGKAPKLLIYYTSRLRSGVPSRFSGSGSGTDFTLTISSLQPEDFATYYCQQGHTLPPTFGQGTKVEIKGGGGSGGGGSGGGGSGGGGSEVQLVQSGAEVKKPGASVKVSCKASGYTFTDSYMSWVRQAPGQGLEWIGDMYPDNGDSSYNQKFRERVTITRDTSTSTAYLELSSLRSEDTAVYYCVLAPRWYFSVWGQGTLVTVSS

SEQ ID NO: 555 - protein, 213 aa, Artificial Sequence; identical to SEQ ID NO: 42
  Synthetic

SEQ ID NO: 556 - protein, 214 aa, Artificial Sequence; identical to SEQ ID NO: 232
  Synthetic

SEQ ID NO: 557 - protein, 450 aa, Artificial Sequence; identical to SEQ ID NO: 229
  Synthetic

SEQ ID NO: 558 - protein, 965 aa, Artificial Sequence; identical to SEQ ID NO: 554
  Synthetic

SEQ ID NO: 559 - protein, 213 aa, Artificial Sequence; identical to SEQ ID NO: 42
  Synthetic

SEQ ID NO: 560 - protein, 214 aa, Artificial Sequence; identical to SEQ ID NO: 232
  Synthetic

SEQ ID NO: 561 - protein, 713 aa, Artificial Sequence; identical to SEQ ID NO: 553
  Synthetic

SEQ ID NO: 562 - protein, 702 aa, Artificial Sequence; identical to SEQ ID NO: 230
  Synthetic

SEQ ID NO: 563 - protein, 213 aa, Artificial Sequence; identical to SEQ ID NO: 42
  Synthetic

SEQ ID NO: 564 - protein, 214 aa, Artificial Sequence; identical to SEQ ID NO: 232
  Synthetic

SEQ ID NO: 565 - protein, 586 aa, Artificial Sequence
  Synthetic
QVQLVQSGAEVKKPGASVKVSCKASGYTFTSYVMHWVRQKPGQGLEWIGYINPYNEGTESTDKFKGRATMTSDKSTSTVYMELSSLRSEDTAVYYCASIYYGYEGTYFGVWGQGTLVTVSSASTKGPSVFPLAPSSKSTSGGTAALGCLVKDYFPEPVTVSWNSGALTSGVHTFPAVLQSSGLYSLSSVVTVPSSSLGTQTYICNVNHKPSNTKVDKKVEPKSCDKTHTCPPCPAPEAAGPSVFLFPPKPKDTLMISRTPEVTCVVVDVSHEDPEVKFNWYVDGVEVHNAKTKPREEQYNSTYRVVSVLTVLHQDWLNGKEYKCKVSNKALPAPIEKTISKAKGQPREPQVYTLPPSREEMTKNQVSLWCLVKGFYPSDIAVEWESNGQPENNYKTTPPVLDSDGSFFLYSKLTVDKSRWQQGNVFSCSVMHEALHNHYTQKSLSLSPGGGGGSGGGGSGGGGSGGGGSEVQLVQSGAEVKKPGASVKVSCKASGYTFTDSYMSWVRQAPGQGLEWIGDMYPDNGDSSYNQKFRERVTITRDTSTSTAYLELSSLRSEDTAVYYCVLAPRWYFSVWGQGTLVTVSS

SEQ ID NO: 566 - protein, 828 aa, Artificial Sequence
  Synthetic
QVQLVQSGAEVKKPGASVKVSCKASGYTFTSYVMHWVRQKPGQGLEWIGYINPYNEGTESTDKFKGRATMTSDKSTSTVYMELSSLRSEDTAVYYCASIYYGYEGTYFGVWGQGTLVTVSSASTKGPSVFPLAPSSKSTSGGTAALGCLVKDYFPEPVTVSWNSGALTSGVHTFPAVLQSSGLYSLSSVVTVPSSSLGTQTYICNVNHKPSNTKVDKKVEPKSCGGGGSGGGGSGGGGSGGGGSEVQLVESGGGLVQPGGSLRLSCAASGFTFSTYAMNWVRQAPGKGLEWVGRIRSKYNNYATYYADSVKGRFTISRDDSKNSLYLQMNSLKTEDTAVYYCVRHGNFGNSYVSWFAYWGQGTLVTVSSASVAAPSVFIFPPSDEQLKSGTASVVCLLNNFYPREAKVQWKVDNALQSGNSQESVTEQDSKDSTYSLSSTLTLSKADYEKHKVYACEVTHQGLSSPVTKSFNRGECDKTHTCPPCPAPEAAGPSVFLFPPKPKDTLMISRTPEVTCVVVDVSHEDPEVKFNWYVDGVEVHNAKTKPREEQYNSTYRVVSVLTVLHQDWLNGKEYKCKVSNKALPAPIEKTISKAKGQPREPQVYTLPPSREEMTKNQVSLSCAVKGFYPSDIAVEWESNGQPENNYKTTPPVLDSDGSFFLVSKLTVDKSRWQQGNVFSCSVMHEALHNRFTQKSLSLSPGGGGGSGGGGSGGGGSGGGGSDIQMTQSPSSLSASVGDRVTITCRASQDISNYLNWYQQKPGKAPKLLIYYTSRLRSGVPSRFSGSGSGTDFTLTISSLQPEDFATYYCQQGHTLPPTFGQGTKVEIK

SEQ ID NO: 567 - protein, 213 aa, Artificial Sequence; identical to SEQ ID NO: 42
  Synthetic

SEQ ID NO: 568 - protein, 214 aa, Artificial Sequence; identical to SEQ ID NO: 232
  Synthetic

SEQ ID NO: 569 - protein, 716 aa, Artificial Sequence
  Synthetic
QVQLVQSGAEVKKPGASVKVSCKASGYTFTSYVMHWVRQKPGQGLEWIGYINPYNEGTESTDKFKGRATMTSDKSTSTVYMELSSLRSEDTAVYYCASIYYGYEGTYFGVWGQGTLVTVSSASTKGPSVFPLAPSSKSTSGGTAALGCLVKDYFPEPVTVSWNSGALTSGVHTFPAVLQSSGLYSLSSVVTVPSSSLGTQTYICNVNHKPSNTKVDKKVEPKSCDKTHTCPPCPAPEAAGPSVFLFPPKPKDTLMISRTPEVTCVVVDVSHEDPEVKFNWYVDGVEVHNAKTKPREEQYNSTYRVVSVLTVLHQDWLNGKEYKCKVSNKALPAPIEKTISKAKGQPREPQVYTLPPSREEMTKNQVSLWCLVKGFYPSDIAVEWESNGQPENNYKTTPPVLDSDGSFFLYSKLTVDKSRWQQGNVFSCSVMHEALHNHYTQKSLSLSPGGGGGSGGGGSGGGGSGGGGSEIVLTQSPATLSLSPGERATLSCRASKSVRTGMHWYQQKPGQAPRLLIYGASNLESGIPARFSGSGSGTDFTLTISSLEPEDFAVYYCQQSWNHFTFGQGTKLEIKGGGGSGGGGSGGGGSGGGGSQVQLQESGPGLVKPSETLSLTCTVSGFSLTSYNVHWIRQPPGKGLEWIGVIWSGVRTDYNSVLKPRVTISVDTSKNQFSLKLSSVTAADTAVYYCARGTYDDNYHDVMDAWGQGTLVTVSS

SEQ ID NO: 570 - protein, 724 aa, Artificial Sequence; identical to SEQ ID NO: 234
  Synthetic

SEQ ID NO: 571 - protein, 213 aa, Artificial Sequence; identical to SEQ ID NO: 42
  Synthetic

SEQ ID NO: 572 - protein, 713 aa, Artificial Sequence; identical to SEQ ID NO: 553
  Synthetic

SEQ ID NO: 573 - protein, 987 aa, Artificial Sequence
  Synthetic
QVQLVQSGAEVKKPGASVKVSCKASGYTFTSYVMHWVRQKPGQGLEWIGYINPYNEGTESTDKFKGRATMTSDKSTSTVYMELSSLRSEDTAVYYCASIYYGYEGTYFGVWGQGTLVTVSSASTKGPSVFPLAPSSKSTSGGTAALGCLVKDYFPEPVTVSWNSGALTSGVHTFPAVLQSSGLYSLSSVVTVPSSSLGTQTYICNVNHKPSNTKVDKKVEPKSCGGGGSGGGGSGGGGSGGGGSQAVVTQEPSLTVSPGGTVTLTCRSSTGAVTTSNYANWVQQKPGQAPRGLIGGTNKRAPWTPARFSGSLLGGKAALTITGAQAEDEADYYCALWYSNLWVFGGGTKLTVLGGGGSGGGGSGGGGSGGGGSEVQLVESGGGLVQPGGSLRLSCAASGFTFSTYAMNWVRQAPGKGLEWVGRIRSKYNNYATYYADSVKGRFTISRDDSKNSLYLQMNSLKTEDTAVYYCVRHGNFGNSYVSWFAYWGQGTLVTVSSDKTHTCPPCPAPEAAGPSVFLFPPKPKDTLMISRTPEVTCVVVDVSHEDPEVKFNWYVDGVEVHNAKTKPREEQYNSTYRVVSVLTVLHQDWLNGKEYKCKVSNKALPAPIEKTISKAKGQPREPQVYTLPPSREEMTKNQVSLSCAVKGFYPSDIAVEWESNGQPENNYKTTPPVLDSDGSFFLVSKLTVDKSRWQQGNVFSCSVMHEALHNRFTQKSLSLSPGGGGGSGGGGSGGGGSGGGGSDIQMTQSPSSLSASVGDRVTITCRASQDISNYLNWYQQKPGKAPKLLIYYTSRLRSGVPSRFSGSGSGTDFTLTISSLQPEDFATYYCQQGHTLPPTFGQGTKVEIKGGGGSGGGGSGGGGSGGGGSEVQLVQSGAEVKKPGASVKVSCKASGYTFTDSYMSWVRQAPGQGLEWIGDMYPDNGDSSYNQKFRERVTITRDTSTSTAYLELSSLRSEDTAVYYCVLAPRWYFSVWGQGTLVTVSS

SEQ ID NO: 574 - protein, 213 aa, Artificial Sequence; identical to SEQ ID NO: 42
  Synthetic

SEQ ID NO: 575 - protein, 450 aa, Artificial Sequence; identical to SEQ ID NO: 229
  Synthetic

SEQ ID NO: 576 - protein, 990 aa, Artificial Sequence
  Synthetic
QVQLVQSGAEVKKPGASVKVSCKASGYTFTSYVMHWVRQKPGQGLEWIGYINPYNEGTESTDKFKGRATMTSDKSTSTVYMELSSLRSEDTAVYYCASIYYGYEGTYFGVWGQGTLVTVSSASTKGPSVFPLAPSSKSTSGGTAALGCLVKDYFPEPVTVSWNSGALTSGVHTFPAVLQSSGLYSLSSVVTVPSSSLGTQTYICNVNHKPSNTKVDKKVEPKSCGGGGSGGGGSGGGGSGGGGSQAVVTQEPSLTVSPGGTVTLTCRSSTGAVTTSNYANWVQQKPGQAPRGLIGGTNKRAPWTPARFSGSLLGGKAALTITGAQAEDEADYYCALWYSNLWVFGGGTKLTVLGGGGSGGGGSGGGGSGGGGSEVQLVESGGGLVQPGGSLRLSCAASGFTFSTYAMNWVRQAPGKGLEWVGRIRSKYNNYATYYADSVKGRFTISRDDSKNSLYLQMNSLKTEDTAVYYCVRHGNFGNSYVSWFAYWGQGTLVTVSSDKTHTCPPCPAPEAAGPSVFLFPPKPKDTLMISRTPEVTCVVVDVSHEDPEVKFNWYVDGVEVHNAKTKPREEQYNSTYRVVSVLTVLHQDWLNGKEYKCKVSNKALPAPIEKTISKAKGQPREPQVYTLPPSREEMTKNQVSLSCAVKGFYPSDIAVEWESNGQPENNYKTTPPVLDSDGSFFLVSKLTVDKSRWQQGNVFSCSVMHEALHNRFTQKSLSLSPGGGGGSGGGGSGGGGSGGGGSEIVLTQSPATLSLSPGERATLSCRASKSVRTGMHWYQQKPGQAPRLLIYGASNLESGIPARFSGSGSGTDFTLTISSLEPEDFAVYYCQQSWNHFTFGQGTKLEIKGGGGSGGGGSGGGGSGGGGSQVQLQESGPGLVKPSETLSLTCTVSGFSLTSYNVHWIRQPPGKGLEWIGVIWSGVRTDYNSVLKPRVTISVDTSKNQFSLKLSSVTAADTAVYYCARGTYDDNYHDVMDAWGQGTLVTVSS

SEQ ID NO: 577 - protein, 213 aa, Artificial Sequence; identical to SEQ ID NO: 42
  Synthetic

SEQ ID NO: 578 - protein, 849 aa, Artificial Sequence
  Synthetic
QVQLVQSGAEVKKPGASVKVSCKASGYTFTSYVMHWVRQKPGQGLEWIGYINPYNEGTESTDKFKGRATMTSDKSTSTVYMELSSLRSEDTAVYYCASIYYGYEGTYFGVWGQGTLVTVSSASTKGPSVFPLAPSSKSTSGGTAALGCLVKDYFPEPVTVSWNSGALTSGVHTFPAVLQSSGLYSLSSVVTVPSSSLGTQTYICNVNHKPSNTKVDKKVEPKSCGGGGSGGGGSGGGGSGGGGSEVQLVESGGGLVQPGGSLRLSCAASGFTFSTYAMNWVRQAPGKGLEWVGRIRSKYNNYATYYADSVKGRFTISRDDSKNSLYLQMNSLKTEDTAVYYCVRHGNFGNSYVSWFAYWGQGTLVTVSSPAPEAAGPSVFLFPPKPKDTLMISRTPEVTCVVVDVSHEDPEVKFNWYVDGVEVHNAKTKPREEQYNSTYRVVSVLTVLHQDWLNGKEYKCKVSNKALPAPIEKTISKAKGQPREPQVYTLPPSREEMTKNQVSLWCLVKGFYPSDIAVEWESNGQPENNYKTTPPVLDSDGSFFLYSKLTVDKSRWQQGNVFSCSVMHEALHNHYTQKSLSLSPGGGGGSGGGGSGGGGSGGGGSDIQMTQSPSSLSASVGDRVTITCRASQDISNYLNWYQQKPGKAPKLLIYYTSRLRSGVPSRFSGSGSGTDFTLTISSLQPEDFATYYCQQGHTLPPTFGQGTKVEIKGGGGSGGGGSGGGGSGGGGSEVQLVQSGAEVKKPGASVKVSCKASGYTFTDSYMSWVRQAPGQGLEWIGDMYPDNGDSSYNQKFRERVTITRDTSTSTAYLELSSLRSEDTAVYYCVLAPRWYFSVWGQGTLVTVSS

SEQ ID NO: 579 - protein, 833 aa, Artificial Sequence
  Synthetic
QVQLVQSGAEVKKPGASVKVSCKASGYTFTSYVMHWVRQKPGQGLEWIGYINPYNEGTESTDKFKGRATMTSDKSTSTVYMELSSLRSEDTAVYYCASIYYGYEGTYFGVWGQGTLVTVSSASTKGPSVFPLAPSSKSTSGGTAALGCLVKDYFPEPVTVSWNSGALTSGVHTFPAVLQSSGLYSLSSVVTVPSSSLGTQTYICNVNHKPSNTKVDKKVEPKSCGGGGSGGGGSGGGGSGGGGSQAVVTQEPSLTVSPGGTVTLTCRSSTGAVTTSNYANWVQQKPGQAPRGLIGGTNKRAPWTPARFSGSLLGGKAALTITGAQAEDEADYYCALWYSNLWVFGGGTKLTVLPAPEAAGPSVFLFPPKPKDTLMISRTPEVTCVVVDVSHEDPEVKFNWYVDGVEVHNAKTKPREEQYNSTYRVVSVLTVLHQDWLNGKEYKCKVSNKALPAPIEKTISKAKGQPREPQVYTLPPSREEMTKNQVSLSCAVKGFYPSDIAVEWESNGQPENNYKTTPPVLDSDGSFFLVSKLTVDKSRWQQGNVFSCSVMHEALHNRFTQKSLSLSPGGGGGSGGGGSGGGGSGGGGSDIQMTQSPSSLSASVGDRVTITCRASQDISNYLNWYQQKPGKAPKLLIYYTSRLRSGVPSRFSGSGSGTDFTLTISSLQPEDFATYYCQQGHTLPPTFGQGTKVEIKGGGGSGGGGSGGGGSGGGGSEVQLVQSGAEVKKPGASVKVSCKASGYTFTDSYMSWVRQAPGQGLEWIGDMYPDNGDSSYNQKFRERVTITRDTSTSTAYLELSSLRSEDTAVYYCVLAPRWYFSVWGQGTLVTVSS

SEQ ID NO: 580 - protein, 213 aa, Artificial Sequence; identical to SEQ ID NO: 42
  Synthetic

SEQ ID NO: 581 - protein, 849 aa, Artificial Sequence; identical to SEQ ID NO: 578
  Synthetic

SEQ ID NO: 582 - protein, 570 aa, Artificial Sequence; identical to SEQ ID NO: 237
  Synthetic

SEQ ID NO: 583 - protein, 213 aa, Artificial Sequence; identical to SEQ ID NO: 42
  Synthetic

SEQ ID NO: 584 - protein, 586 aa, Artificial Sequence; identical to SEQ ID NO: 236
  Synthetic

SEQ ID NO: 585 - protein, 833 aa, Artificial Sequence; identical to SEQ ID NO: 579
  Synthetic

SEQ ID NO: 586 - protein, 213 aa, Artificial Sequence; identical to SEQ ID NO: 42
  Synthetic

SEQ ID NO: 587 - protein, 722 aa, Artificial Sequence
  Synthetic
QVQLVQSGAEVKKPGASVKVSCKASGYTFTSYVMHWVRQKPGQGLEWIGYINPYNEGTESTDKFKGRATMTSDKSTSTVYMELSSLRSEDTAVYYCASIYYGYEGTYFGVWGQGTLVTVSSASTKGPSVFPLAPSSKSTSGGTAALGCLVKDYFPEPVTVSWNSGALTSGVHTFPAVLQSSGLYSLSSVVTVPSSSLGTQTYICNVNHKPSNTKVDKKVEPKSCGGGGSGGGGSGGGGSGGGGSEVQLVESGGGLVQPGGSLRLSCAASGFTFSTYAMNWVRQAPGKGLEWVGRIRSKYNNYATYYADSVKGRFTISRDDSKNSLYLQMNSLKTEDTAVYYCVRHGNFGNSYVSWFAYWGQGTLVTVSSPAPEAAGPSVFLFPPKPKDTLMISRTPEVTCVVVDVSHEDPEVKFNWYVDGVEVHNAKTKPREEQYNSTYRVVSVLTVLHQDWLNGKEYKCKVSNKALPAPIEKTISKAKGQPREPQVYTLPPSREEMTKNQVSLWCLVKGFYPSDIAVEWESNGQPENNYKTTPPVLDSDGSFFLYSKLTVDKSRWQQGNVFSCSVMHEALHNHYTQKSLSLSPGGGGGSGGGGSGGGGSGGGGSEVQLVQSGAEVKKPGASVKVSCKASGYTFTDSYMSWVRQAPGQGLEWIGDMYPDNGDSSYNQKFRERVTITRDTSTSTAYLELSSLRSEDTAVYYCVLAPRWYFSVWGQGTLVTVSS

SEQ ID NO: 588 - protein, 696 aa, Artificial Sequence
  Synthetic
QVQLVQSGAEVKKPGASVKVSCKASGYTFTSYVMHWVRQKPGQGLEWIGYINPYNEGTESTDKFKGRATMTSDKSTSTVYMELSSLRSEDTAVYYCASIYYGYEGTYFGVWGQGTLVTVSSASTKGPSVFPLAPSSKSTSGGTAALGCLVKDYFPEPVTVSWNSGALTSGVHTFPAVLQSSGLYSLSSVVTVPSSSLGTQTYICNVNHKPSNTKVDKKVEPKSCGGGGSGGGGSGGGGSGGGGSQAVVTQEPSLTVSPGGTVTLTCRSSTGAVTTSNYANWVQQKPGQAPRGLIGGTNKRAPWTPARFSGSLLGGKAALTITGAQAEDEADYYCALWYSNLWVFGGGTKLTVLPAPEAAGPSVFLFPPKPKDTLMISRTPEVTCVVVDVSHEDPEVKFNWYVDGVEVHNAKTKPREEQYNSTYRVVSVLTVLHQDWLNGKEYKCKVSNKALPAPIEKTISKAKGQPREPQVYTLPPSREEMTKNQVSLSCAVKGFYPSDIAVEWESNGQPENNYKTTPPVLDSDGSFFLVSKLTVDKSRWQQGNVFSCSVMHEALHNRFTQKSLSLSPGGGGGSGGGGSGGGGSGGGGSDIQMTQSPSSLSASVGDRVTITCRASQDISNYLNWYQQKPGKAPKLLIYYTSRLRSGVPSRFSGSGSGTDFTLTISSLQPEDFATYYCQQGHTLPPTFGQGTKVEIK

SEQ ID NO: 589 - protein, 213 aa, Artificial Sequence; identical to SEQ ID NO: 42
  Synthetic

SEQ ID NO: 590 - protein, 586 aa, Artificial Sequence; identical to SEQ ID NO: 236
  Synthetic

SEQ ID NO: 591 - protein, 570 aa, Artificial Sequence; identical to SEQ ID NO: 237
  Synthetic

SEQ ID NO: 592 - protein, 477 aa, Artificial Sequence; identical to SEQ ID NO: 142
  Synthetic

SEQ ID NO: 593 - protein, 713 aa, Artificial Sequence; identical to SEQ ID NO: 553
  Synthetic

SEQ ID NO: 594 - protein, 714 aa, Artificial Sequence; identical to SEQ ID NO: 243
  Synthetic

SEQ ID NO: 595 - protein, 213 aa, Artificial Sequence; identical to SEQ ID NO: 42
  Synthetic

SEQ ID NO: 596 - protein, 586 aa, Artificial Sequence; identical to SEQ ID NO: 236
  Synthetic

SEQ ID NO: 597 - protein, 814 aa, Artificial Sequence
  Synthetic
QVQLVQSGAEVKKPGASVKVSCKASGYTFTSYVMHWVRQKPGQGLEWIGYINPYNEGTESTDKFKGRATMTSDKSTSTVYMELSSLRSEDTAVYYCASIYYGYEGTYFGVWGQGTLVTVSSASTKGPSVFPLAPSSKSTSGGTAALGCLVKDYFPEPVTVSWNSGALTSGVHTFPAVLQSSGLYSLSSVVTVPSSSLGTQTYICNVNHKPSNTKVDKKVEPKSCGGGGSGGGGSGGGGSGGGGSEVQLVQSGAEVKKPGASVKVSCKASGYTFTDSYMSWVRQAPGQGLEWIGDMYPDNGDSSYNQKFRERVTITRDTSTSTAYLELSSLRSEDTAVYYCVLAPRWYFSVWGQGTLVTVSSASVAAPSVFIFPPSDEQLKSGTASVVCLLNNFYPREAKVQWKVDNALQSGNSQESVTEQDSKDSTYSLSSTLTLSKADYEKHKVYACEVTHQGLSSPVTKSFNRGECGGGGSGGGGSGGGGSGGGGSQAVVTQEPSLTVSPGGTVTLTCRSSTGAVTTSNYANWVQQKPGQAPRGLIGGTNKRAPWTPARFSGSLLGGKAALTITGAQAEDEADYYCALWYSNLWVFGGGTKLTVLPAPEAAGPSVFLFPPKPKDTLMISRTPEVTCVVVDVSHEDPEVKFNWYVDGVEVHNAKTKPREEQYNSTYRVVSVLTVLHQDWLNGKEYKCKVSNKALPAPIEKTISKAKGQPREPQVYTLPPSREEMTKNQVSLSCAVKGFYPSDIAVEWESNGQPENNYKTTPPVLDSDGSFFLVSKLTVDKSRWQQGNVFSCSVMHEALHNRFTQKSLSLSPGK

SEQ ID NO: 598 - protein, 213 aa, Artificial Sequence; identical to SEQ ID NO: 42
  Synthetic

SEQ ID NO: 599 - protein, 212 aa, Artificial Sequence; identical to SEQ ID NO: 148
  Synthetic

SEQ ID NO: 600 - protein, 586 aa, Artificial Sequence; identical to SEQ ID NO: 245
  Synthetic

SEQ ID NO: 601 - protein, 570 aa, Artificial Sequence; identical to SEQ ID NO: 550
  Synthetic

SEQ ID NO: 602 - protein, 213 aa, Artificial Sequence; identical to SEQ ID NO: 42
  Synthetic

SEQ ID NO: 603 - protein, 212 aa, Artificial Sequence; identical to SEQ ID NO: 148
  Synthetic

SEQ ID NO: 604 - protein, 713 aa, Artificial Sequence; identical to SEQ ID NO: 553
  Synthetic

SEQ ID NO: 605 - protein, 965 aa, Artificial Sequence; identical to SEQ ID NO: 554
  Synthetic

SEQ ID NO: 606 - protein, 213 aa, Artificial Sequence; identical to SEQ ID NO: 42
  Synthetic

SEQ ID NO: 607 - protein, 214 aa, Artificial Sequence; identical to SEQ ID NO: 232
  Synthetic

SEQ ID NO: 608 - protein, 450 aa, Artificial Sequence; identical to SEQ ID NO: 229
  Synthetic

SEQ ID NO: 609 - protein, 965 aa, Artificial Sequence; identical to SEQ ID NO: 554
  Synthetic

SEQ ID NO: 610 - protein, 213 aa, Artificial Sequence; identical to SEQ ID NO: 42
  Synthetic

SEQ ID NO: 611 - protein, 214 aa, Artificial Sequence; identical to SEQ ID NO: 232
  Synthetic

SEQ ID NO: 612 - protein, 713 aa, Artificial Sequence; identical to SEQ ID NO: 553
  Synthetic

SEQ ID NO: 613 - protein, 702 aa, Artificial Sequence; identical to SEQ ID NO: 230
  Synthetic

SEQ ID NO: 614 - protein, 213 aa, Artificial Sequence; identical to SEQ ID NO: 42
  Synthetic

SEQ ID NO: 615 - protein, 214 aa, Artificial Sequence; identical to SEQ ID NO: 232
  Synthetic

SEQ ID NO: 616 - protein, 586 aa, Artificial Sequence; identical to SEQ ID NO: 565
  Synthetic

SEQ ID NO: 617 - protein, 828 aa, Artificial Sequence; identical to SEQ ID NO: 566
  Synthetic

SEQ ID NO: 618 - protein, 213 aa, Artificial Sequence; identical to SEQ ID NO: 42
  Synthetic

SEQ ID NO: 619 - protein, 214 aa, Artificial Sequence; identical to SEQ ID NO: 232
  Synthetic

SEQ ID NO: 620 - protein, 716 aa, Artificial Sequence; identical to SEQ ID NO: 569
  Synthetic

SEQ ID NO: 621 - protein, 724 aa, Artificial Sequence; identical to SEQ ID NO: 234
  Synthetic

SEQ ID NO: 622 - protein, 213 aa, Artificial Sequence; identical to SEQ ID NO: 42
  Synthetic

SEQ ID NO: 623 - protein, 713 aa, Artificial Sequence; identical to SEQ ID NO: 553
  Synthetic

SEQ ID NO: 624 - protein, 987 aa, Artificial Sequence; identical to SEQ ID NO: 573
  Synthetic

SEQ ID NO: 625 - protein, 213 aa, Artificial Sequence; identical to SEQ ID NO: 42
  Synthetic

SEQ ID NO: 626 - protein, 450 aa, Artificial Sequence; identical to SEQ ID NO: 229
  Synthetic

SEQ ID NO: 627 - protein, 990 aa, Artificial Sequence; identical to SEQ ID NO: 576
  Synthetic

SEQ ID NO: 628 - protein, 213 aa, Artificial Sequence; identical to SEQ ID NO: 42
  Synthetic

SEQ ID NO: 629 - protein, 849 aa, Artificial Sequence; identical to SEQ ID NO: 578
  Synthetic

SEQ ID NO: 630 - protein, 833 aa, Artificial Sequence; identical to SEQ ID NO: 579
  Synthetic

SEQ ID NO: 631 - protein, 213 aa, Artificial Sequence; identical to SEQ ID NO: 42
  Synthetic

SEQ ID NO: 632 - protein, 849 aa, Artificial Sequence; identical to SEQ ID NO: 578
  Synthetic

SEQ ID NO: 633 - protein, 570 aa, Artificial Sequence; identical to SEQ ID NO: 237
  Synthetic

SEQ ID NO: 634 - protein, 213 aa, Artificial Sequence; identical to SEQ ID NO: 42
  Synthetic

SEQ ID NO: 635 - protein, 586 aa, Artificial Sequence; identical to SEQ ID NO: 236
  Synthetic

SEQ ID NO: 636 - protein, 833 aa, Artificial Sequence; identical to SEQ ID NO: 579
  Synthetic

SEQ ID NO: 637 - protein, 213 aa, Artificial Sequence; identical to SEQ ID NO: 42
  Synthetic

SEQ ID NO: 638 - protein, 722 aa, Artificial Sequence; identical to SEQ ID NO: 587
  Synthetic

SEQ ID NO: 639 - protein, 696 aa, Artificial Sequence; identical to SEQ ID NO: 588
  Synthetic

SEQ ID NO: 640 - protein, 213 aa, Artificial Sequence; identical to SEQ ID NO: 42
  Synthetic

SEQ ID NO: 641 - protein, 586 aa, Artificial Sequence; identical to SEQ ID NO: 236
  Synthetic

SEQ ID NO: 642 - protein, 570 aa, Artificial Sequence; identical to SEQ ID NO: 237
  Synthetic

SEQ ID NO: 643 - protein, 477 aa, Artificial Sequence; identical to SEQ ID NO: 142
  Synthetic

SEQ ID NO: 644 - protein, 713 aa, Artificial Sequence; identical to SEQ ID NO: 553
  Synthetic

SEQ ID NO: 645 - protein, 714 aa, Artificial Sequence; identical to SEQ ID NO: 243
  Synthetic

SEQ ID NO: 646 - protein, 213 aa, Artificial Sequence; identical to SEQ ID NO: 42
  Synthetic

SEQ ID NO: 647 - protein, 586 aa, Artificial Sequence; identical to SEQ ID NO: 236
  Synthetic

SEQ ID NO: 648 - protein, 814 aa, Artificial Sequence; identical to SEQ ID NO: 597
  Synthetic

SEQ ID NO: 649 - protein, 213 aa, Artificial Sequence; identical to SEQ ID NO: 42
  Synthetic

SEQ ID NO: 650 - protein, 212 aa, Artificial Sequence; identical to SEQ ID NO: 148
  Synthetic

SEQ ID NO: 651 - protein, 712 aa, Artificial Sequence
  Synthetic
QVQLVQSGAEVKKPGASVKVSCKASGYTFTSYVMHWVRQKPGQGLEWIGYINPYNEGTESTDKFKGRATMTSDKSTSTVYMELSSLRSEDTAVYYCASIYYGYEGTYFGVWGQGTLVTVSSASTKGPSVFPLAPSSKSTSGGTAALGCLVKDYFPEPVTVSWNSGALTSGVHTFPAVLQSSGLYSLSSVVTVPSSSLGTQTYICNVNHKPSNTKVDKKVEPKSCDKTHTCPPCPAPELLGPSVFLFPPKPKDTLMISRTPEVTCVVVDVSHEDPEVKFNWYVDGVEVHNAKTKPREEQYNSTYRVVSVLTVLHQDWLNGKEYKCKVSNKALPAPIEKTISKAKGQPREPQVYTLPPSREEMTKNQVSLTCLVKGFYPSDIAVEWESNGQPENNYKTTPPVLDSDGSFFLYSKLTVDKSRWQQGNVFSCSVMHEALHNHYTQKSLSLSPGGGGGSGGGGSGGGGSGGGGSDIQMTQSPSSLSASVGDRVTITCRASQDIRSNLNWYQQKPGGAVKLLIYYTSRLHSGVPSRFSGSGSGTDYTLTISSLQPEDFATYFCQQSEKLPRTFGGGTKVEIRGGGGSGGGGSGGGGSGGGGSQVQLVQSGAEVKKPGASVKVSCKASGYTFAGFEMHWVRQAPGQGLEWMGAIDPKTGGTDYNQKFKDRVTMTRDTSISTAYMELSRLRSDDTAVYYCARDLGYFDVWGQGTLVTVSS

SEQ ID NO: 652 - protein, 477 aa, Artificial Sequence; identical to SEQ ID NO: 142
  Synthetic

SEQ ID NO: 653 - protein, 712 aa, Artificial Sequence; identical to SEQ ID NO: 651
  Synthetic

SEQ ID NO: 654 - protein, 477 aa, Artificial Sequence; identical to SEQ ID NO: 142
  Synthetic

SEQ ID NO: 655 - protein, 712 aa, Artificial Sequence
  Synthetic
QVQLVQSGAEVKKPGASVKVSCKASGYTFTSYVMHWVRQKPGQGLEWIGYINPYNEGTESTDKFKGRATMTSDKSTSTVYMELSSLRSEDTAVYYCASIYYGYEGTYFGVWGQGTLVTVSSASTKGPSVFPLAPSSKSTSGGTAALGCLVKDYFPEPVTVSWNSGALTSGVHTFPAVLQSSGLYSLSSVVTVPSSSLGTQTYICNVNHKPSNTKVDKKVEPKSCDKTHTCPPCPAPELLGPSVFLFPPKPKDTLMISRTPEVTCVVVDVSHEDPEVKFNWYVDGVEVHNAKTKPREEQYNSTYRVVSVLTVLHQDWLNGKEYKCKVSNKALPAPIEKTISKAKGQPREPQVYTLPPSREEMTKNQVSLWCLVKGFYPSDIAVEWESNGQPENNYKTTPPVLDSDGSFFLYSKLTVDKSRWQQGNVFSCSVMHEALHNHYTQKSLSLSPGGGGGSGGGGSGGGGSGGGGSDIQMTQSPSSLSASVGDRVTITCRASQDIRSNLNWYQQKPGGAVKLLIYYTSRLHSGVPSRFSGSGSGTDYTLTISSLQPEDFATYFCQQSEKLPRTFGGGTKVEIRGGGGSGGGGSGGGGSGGGGSQVQLVQSGAEVKKPGASVKVSCKASGYTFAGFEMHWVRQAPGQGLEWMGAIDPKTGGTDYNQKFKDRVTMTRDTSISTAYMELSRLRSDDTAVYYCARDLGYFDVWGQGTLVTVSS

SEQ ID NO: 656 - protein, 713 aa, Artificial Sequence
  Synthetic
QVQLVQSGAEVKKPGASVKVSCKASGYTFTSYVMHWVRQKPGQGLEWIGYINPYNEGTESTDKFKGRATMTSDKSTSTVYMELSSLRSEDTAVYYCASIYYGYEGTYFGVWGQGTLVTVSSASTKGPSVFPLAPSSKSTSGGTAALGCLVKDYFPEPVTVSWNSGALTSGVHTFPAVLQSSGLYSLSSVVTVPSSSLGTQTYICNVNHKPSNTKVDKKVEPKSCDKTHTCPPCPAPELLGPSVFLFPPKPKDTLMISRTPEVTCVVVDVSHEDPEVKFNWYVDGVEVHNAKTKPREEQYNSTYRVVSVLTVLHQDWLNGKEYKCKVSNKALPAPIEKTISKAKGQPREPQVYTLPPSREEMTKNQVSLSCAVKGFYPSDIAVEWESNGQPENNYKTTPPVLDSDGSFFLVSKLTVDKSRWQQGNVFSCSVMHEALHNRFTQKSLSLSPGGGGGSGGGGSGGGGSGGGGSDIQMTQSPSSLSASVGDRVTITCRASQDISNYLNWYQQKPGKAPKLLIYYTSRLRSGVPSRFSGSGSGTDFTLTISSLQPEDFATYYCQQGHTLPPTFGQGTKVEIKGGGGSGGGGSGGGGSGGGGSEVQLVQSGAEVKKPGASVKVSCKASGYTFTDSYMSWVRQAPGQGLEWIGDMYPDNGDSSYNQKFRERVTITRDTSTSTAYLELSSLRSEDTAVYYCVLAPRWYFSVWGQGTLVTVSS

SEQ ID NO: 657 - protein, 213 aa, Artificial Sequence; identical to SEQ ID NO: 42
  Synthetic

SEQ ID NO: 658 - protein, 712 aa, Artificial Sequence; identical to SEQ ID NO: 651
  Synthetic

SEQ ID NO: 659 - protein, 477 aa, Artificial Sequence; identical to SEQ ID NO: 142
  Synthetic

SEQ ID NO: 660 - protein, 712 aa, Artificial Sequence; identical to SEQ ID NO: 651
  Synthetic

SEQ ID NO: 661 - protein, 477 aa, Artificial Sequence; identical to SEQ ID NO: 142
  Synthetic

SEQ ID NO: 662 - protein, 712 aa, Artificial Sequence; identical to SEQ ID NO: 655
  Synthetic

SEQ ID NO: 663 - protein, 722 aa, Artificial Sequence
  Synthetic
QVQLVQSGAEVKKPGASVKVSCKASGYTFTSYVMHWVRQKPGQGLEWIGYINPYNEGTESTDKFKGRATMTSDKSTSTVYMELSSLRSEDTAVYYCASIYYGYEGTYFGVWGQGTLVTVSSASTKGPSVFPLAPSSKSTSGGTAALGCLVKDYFPEPVTVSWNSGALTSGVHTFPAVLQSSGLYSLSSVVTVPSSSLGTQTYICNVNHKPSNTKVDKKVEPKSCDKTHTCPPCPAPELLGPSVFLFPPKPKDTLMISRTPEVTCVVVDVSHEDPEVKFNWYVDGVEVHNAKTKPREEQYNSTYRVVSVLTVLHQDWLNGKEYKCKVSNKALPAPIEKTISKAKGQPREPQVYTLPPSREEMTKNQVSLSCAVKGFYPSDIAVEWESNGQPENNYKTTPPVLDSDGSFFLVSKLTVDKSRWQQGNVFSCSVMHEALHNRFTQKSLSLSPGGGGGSGGGGSGGGGSGGGGSDIQMTQSPSSVSASVGDRVTITCRASQGIYSWLAWYQQKPGKAPNLLIYTASTLQSGVPSRFSGSGSGTDFTLTISSLQPEDFATYYCQQANIFPLTFGGGTKVEIKGGGGSGGGGSGGGGSGGGGSQVQLVQSGAEVKKPGASVKVSCKASGYTFTGYYMHWVRQAPGQGLEWMGWINPDSGGTNYAQKFQGRVTMTRDTSISTAYMELNRLRSDDTAVYYCARDQPLGYCTNGVCSYFDYWGQGTLVTVSS

SEQ ID NO: 664 - protein, 213 aa, Artificial Sequence; identical to SEQ ID NO: 42
  Synthetic

SEQ ID NO: 665 - protein, 5 aa, Artificial Sequence
  Synthetic
GGGGS

SEQ ID NO: 666 - protein, 10 aa, Artificial Sequence
  Synthetic
GGGGSGGGGS

SEQ ID NO: 667 - protein, 15 aa, Artificial Sequence
  Synthetic
GGGGSGGGGSGGGGS

SEQ ID NO: 668 - protein, 20 aa, Artificial Sequence
  Synthetic
GGGGSGGGGSGGGGSGGGGS

SEQ ID NO: 669 - protein, 25 aa, Artificial Sequence
  Synthetic
GGGGSGGGGSGGGGSGGGGSGGGGS

SEQ ID NO: 670 - protein, 30 aa, Artificial Sequence
  Synthetic
GGGGSGGGGSGGGGSGGGGSGGGGSGGGGS

SEQ ID NO: 671 - protein, 5 aa, Artificial Sequence
  Synthetic
SGGGS
